(19) United States
(12) Patent Application Publication
(10) Pub. No.: US 2009/0258848 A1
(43) Pub. Date: Oct. 15, 2009

(54) BIOMARKERS FOR INFLAMMATORY BOWEL DISEASE

(75) Inventors: Shukti Chakravarti, Lutherville, MD (US); Feng Wu, Lutherville, MD (US)

Correspondence Address: EDWARDS ANGELL PALMER & DODGE LLP, P.O. BOX 55874, BOSTON, MA, 02205, US

(73) Assignee: THE JOHNS HOPKINS UNIVERSITY, Baltimore, MD (US)

(21) Appl. No.: 11/750,114

(22) Filed: May 17, 2007

Related U.S. Application Data
(60) Provisional application No. 60/801,663, filed on May 19, 2006.

(30) Foreign Application Priority Data
Dec. 6, 2005 (US) PCT/US05/44423

(51) Int. Cl. A61K 31/573; C07H 21/02; C12Q 1/68; A61P 1/00

(52) U.S. Cl. 514/177; 536/23.1; 435/6

(57) ABSTRACT

The present invention relates to methods of determining inflammatory bowel disease status in a subject. The invention further relates to kits for determining inflammatory bowel disease status in a subject. The invention further related to methods of identifying biomarker for determining inflammatory bowel disease status in a subject.

### RELATED APPLICATIONS

[0001] This application claims priority from U.S. Provisional Application No. 60/633,662, filed Dec. 6, 2004; PCT Application No.: PCT/US2005/44423 filed Dec. 6, 2005; and U.S. Provisional Application No. 60/801,663, filed May 19, 2006, which are incorporated herein by reference in their entirety.

### BACKGROUND OF THE INVENTION

[0002] Crohn's disease (CD) and ulcerative colitis (UC), are complex, heterogeneous, multifactorial diseases involving genetic, environmental and microbial factors. These inflammatory bowel disease (IBD) subtypes have distinctive etiopathologies yet share clinical and demographic features.¹⁻⁴ As many as 4 million people worldwide suffer from a form IBD.

[0003] Crohn's disease and ulcerative colitis have similar symptoms, but are very different in the manner in which they affect the digestive tract. Moreover, in 10% of patients with colonic disease, a distinction between UC and CD cannot be made (“indeterminate colitis”).⁵ Diagnosis and classification of these diseases are primarily based on patient histories and serologic, radiological, endoscopic and histopathology findings.⁶ Early, precise differentiation and diagnosis would directly influence the clinical treatment, patient management and the outcome of such diseases.

[0004] Thus, accurate and early diagnosis of inflammatory bowel disease is important for curative treatment interventions. Tools and methodologies for early detection and diagnosis of inflammatory bowel disease directly impacts treatment options and prognosis.

[0005] In present clinical practice, for example, screening for inflammatory bowel disease is based on clinical examination and on sigmoidoscopy or colonoscopy. Current methods for detection, diagnosis, prognosis, and treatment of IBD fails to satisfactorily reduce the morbidity associated with the disease. There is thus a need in the art for further reduction of mortality rates, and early IBD detection in minimally invasive, cost efficient formats.

### BRIEF SUMMARY OF THE INVENTION

[0006] The present invention provides, for the first time, novel biomarkers that are differentially present in the samples of inflammatory bowel disease (IBD) subjects and in the samples of control subjects. The present invention also provides sensitive and quick methods and kits that are useful for determining the inflammatory bowel disease status by measuring these novel markers. The measurement of these markers alone or in combination, in patient samples provides information that a diagnostician can correlate with a probable diagnosis of inflammatory bowel disease or a negative diagnosis (e.g., normal or disease-free). The markers are characterized by their known protein identities or by their m/z value or molecular weight and/or by characteristics discussed herein. The markers can be resolved in a sample by using a variety of techniques, e.g., microarrays, PCT techniques (e.g., real time, reverse transcriptase, PCR), and fractionation techniques (e.g., chromatographic separation coupled with mass spectrometry, protein capture using immobilized antibodies or by traditional immunoassays).

[0007] The present invention provides a method of qualifying inflammatory bowel disease status in a subject comprising measuring at least one biomarker in a sample from the subject.

[0008] In one embodiment, the method of resolution involves Surface-Enhanced Laser Desorption/Ionization (“SELDI”) mass spectrometry, in which the surface of the mass spectrometry probe comprises adsorbents that bind the markers.

[0009] In one aspect, the invention provides biomarkers for inflammatory bowel disease status comprising one or more of the following Markers 1-97, 99-211, 213-264, 266-401 and combinations thereof. These Markers 1-97, 99-211, 213-264, 266-401 are set forth in Table 1-9, which follows and are sometimes referred to herein as biomarkers of Table I or similar designations.

[0010] In one aspect, the invention provides biomarkers for inflammatory bowel disease status comprising one or more of Markers 1-97, 99-211, 213-264, 266-401 and combinations thereof.

[0011] In one embodiment, Markers 1-31, 76-97, 125-136, 187-211, 213-230, 231-264, 266-306 are Markers of Crohn's disease

[0012] In one embodiment, Markers 187-230 and 266-306 are Markers of Crohn's disease and ulcerative colitis.

[0013] In one embodiment, markers 187-211 and 266-290 are upregulated.

[0014] In one embodiment, Markers 213-230 and 291-306 are down-regulated.

[0015] In one embodiment, one or more of Markers 49-75, 99-124, 137-230, 266-306, and 307-401 are markers of ulcerative colitis.

[0016] In one embodiment, one or more of Markers 49-60, 99-124 187-211, 266-290, and 307-332 are up-regulated in ulcerative colitis.

[0017] In one embodiment, Markers 61-75, 137-186 and 333-401 are down-regulated in ulcerative colitis.

[0018] In one embodiment, one or more of Markers 76-97, 187-211, 231-245, and 266-290 are up-regulated in Crohn's Disease.

[0019] In one embodiment, Markers 125-136, 213-230, 253-261, and 291-306 are down-regulated in Crohn's Disease.

[0020] In one embodiment, Markers 1-31 are markers of Crohn's Disease.

[0021] In one embodiment, Markers 32-48 are markers of IBD.

[0022] In one embodiment, the biomarker for inflammatory bowel disease status of the invention comprises Markers 1-97, 99-211, 213-264, 266-401. In one embodiment, markers 1-48 are Markers of Crohn's disease (CD). In another embodiment, markers 49-75 are markers of ulcerative colitis. In another embodiment, markers 49-60 are up-regulated in ulcerative colitis (UC). In yet another embodiment, markers 61-75 are down-regulated in ulcerative colitis.

[0023] In other embodiments, markers 1, 2, 4 and 5 are correlate with CD; markers 6 and 10 correlate with CD; markers 17, 18, and 21 correlate with CD; markers 55 and 57 correlate with UC; markers 55 and 57 are up-regulated in UC; markers 69, 74 and 75 and are down-regulated in UC.

[0024] In one aspect, markers may discriminate between IBD disease state, for example, markers 1, 6, 17, 55 and 69 discriminate between UC and CD; markers 2, 10, 18, 57, and 74 also discriminate between UC and CD; as do markers 4, 6, 21, 55, and 69; and markers 1, 6, and 17; and markers 55 and 69.

[0025] In certain embodiments, the biomarkers may be used in combination, for example, markers 1, 2, 4 and 5; markers 6 and 10; markers 17, 18, and 21; markers 55 and 57; markers 69, 74 and 75; markers 1, 6, 17, 55 and 69; markers 2, 10, 18, 57, and 74; 4, 6, 21, 55, and 69; markers 1, 6, and 17; and markers 55 and 69.

[0026] The invention provides, in one aspect, methods for qualifying IBD status in a subject comprising measuring at least one biomarker in a sample from the subject, wherein the biomarker is selected from one or more of the biomarkers of Tables 1-9, and correlating the measurement with inflammatory bowel disease status.

[0027] In one embodiment, the inflammatory bowel disease is ulcerative colitis (UC) and/or Crohn's disease (CD).

[0028] In one embodiment, the method further comprises managing subject treatment based on the status.

[0029] In a related embodiment the managing subject treatment is selected from ordering further diagnostic tests (e.g., colonoscopy and imaging techniques), administering at least one therapeutic agent, surgery, surgery followed or preceded by at least one therapeutic agent, biotherapy, and taking no further action.

[0030] In another related embodiment, the therapeutic agent is selected from one or more of an antibiotic, an antispasmotic, and/or an antidepressant. Examples of antibiotics include, for example, rifaximin. Other therapeutic agents include, for example, sulfa drugs, corticosteriods (prednisone), 5-aminosalicylates (Asacol, Pentasa, Rowasa, or 5-ASA), immunosuppressives (azathioprine, Imuran, Cyclosporine, 6-MP, Purinethol and Methotrexate), anti-TNF (Remicade), anticholinergics, dicyclomine (Bentyl), belladonna/phenobarbital (Donnatal, Antispas, bBarbidonna, donnapine, hyosophen, Spasmolin), hyoscyamine (Levsin, Anaspaz), chlordiazepoxide/clidinium (Librax), anti-diarrheals, diphenoxylate/atropine (Lomotil), alosetron hydrochloride (Lotronex), tegaserod (Zelnorm, Zelmac), rifaximin (Xifaxin), sulfasalazine (Azulfadine), mesalamine (Asacol, Pentasa, Rowasa), osalazine (Dipentum), (Colazal), corticosteroids (prednisone), balsalazide disodium (Colazal®), cyclosporine, methotrexate, infliximab (Remicade), rifaximin, and budesonide (Entocort EC).

[0031] In one embodiment, the method for qualifying inflammatory bowel disease status in a subject may further comprise measuring the at least one biomarker after subject management.

[0032] In another embodiment, the inflammatory bowel disease status is selected from one or more of the subject's risk of IBD, the presence or absence of IBD, the type of IBD disease, the stage of IBD and effectiveness of treatment.

[0033] In another embodiment, the inflammatory bowel disease status is selected from one or more of the presence or absence of alternating diarrhea and constipation, abdominal pain, bloating, spasms, nausea, bloody diarrhea, fever, dehydration, eye inflammation, joint pain, skin rashes or lesions, mouth ulcers, chronic diarrhea, weight loss, lack of appetite, nutritional deficiencies, and/or inflamed colon.

[0034] Methods, according to one embodiment, may further comprise assessing the status of the inflammatory bowel disease, for example, by barium enema, upper GI series, stool culture, blood tests (to determine a white blood cell count or if anemia is present), fecal occult blood test, sigmoidoscopy, and/or colonoscopy.

[0035] The invention provides, in another aspect, methods for differentiating between a diagnosis of UC and CD comprising detecting in a subject sample an amount of at least one biomarker wherein the biomarker is selected from one or more of the biomarkers of Tables 1-99, and correlating the amount with a diagnosis of inflammatory bowel disease or non-inflammatory bowel disease.

TABLE 1
CD Markers

| Marker | Gene | Symbol |
|---|---|---|
| Marker 1 | Adrenomedullin** | ADM |
| Marker 2 | Serine protease inhibitor, Kazal type 1 | SPINK1 |
| Marker 3 | Serine/cysteine proteinase inhibitor, | SERPINA1 |
| | clade A, 1 | |
| Marker 4 | Signal transducer and activator of | STAT1 |
| | transcription 1 | |
| Marker 5 | Signal transducer and activator of | STAT3 |
| | transcription 3** | |
| Marker 6 | Proteasome activator subunit 2** | PSME2 |
| Marker 7 | Proteasome subunit, beta type, 8** | PSMB8 |
| Marker 8 | Ubiquitin D | UBD |
| Marker 9 | Ubiquitin-conjugating enzyme E2L 6 | UBE2L6 |
| Marker 10 | Transporter 1, ATP-binding cassette, sub B | TAP1 |
| Marker 11 | Caspase 1 | CASP1 |
| Marker 12 | Caspase 10 | CASP10 |
| Marker 13 | Acetylserotonin O-methyltransferase | ASMT |
| Marker 14 | Mucin 1, transmembrane | MUC1 |
| Marker 15 | Myosin, light polypeptide 3 | MYL3 |
| Marker 16 | Chymotrypsin-like | CTRL |
| Marker 17 | Interferon induced transmembrane | IFITM1 |
| | protein 1 | |
| Marker 18 | Interferon induced transmembrane | IFITM3 |
| | protein 3 | |
| Marker 19 | Interferon stimulated gene 20 kDa | ISG20 |
| Marker 20 | Interferon-induced protein 35** | IFI35 |
| Marker 21 | Interleukin 1, beta | IL1B |
| Marker 22 | Leukocyte Ig-like receptor, subfamily B, 1 | LILRB1 |
| Marker 23 | MHC, class II, DM alpha | HLA-DMA |
| Marker 24 | SP110 nuclear body protein | SP110 |
| Marker 25 | Chemokine (C—X—C motif) ligand 1** | CXCL1 |
| Marker 26 | Chemokine (C—X—C motif) ligand 3 | CXCL3 |
| Marker 27 | Interleukin 8 | IL8 |
| Marker 28 | Regenerating islet-derived 1 beta | REG1B |
| Marker 29 | S100 calcium binding protein A8 | S100A8 |
| Marker 30 | Lipase, gastric | LIPF |
| Marker 31 | Ig lambda variable (IV)/OR22-2 | IGLVIVOR22 |
| | | -2 |

TABLE 2
IBD Markers

| Marker | Gene | Symbol |
|---|---|---|
| Marker 32 | Ig heavy constant gamma 4 (G4m marker) | IGHG4 |
| Marker 33 | Defensin, alpha 6, Paneth cell-specific | DEFA6 |
| Marker 34 | Complement component 4 binding protein, β | C4BPB |
| Marker 35 | Decay accelerating factor for complement | DAF |
| Marker 36 | Membrane-associated protein 17 | MAP17 |
| Marker 37 | Chemokine (C—X—C motif) ligand 2 | CXCL2 |
| Marker 38 | Deleted in malignant brain tumors 1** | DMBT1 |
| Marker 39 | Interferon, alpha-inducible protein | G1P3 |
| Marker 40 | Lipocalin 2 | LCN2 |
| Marker 41 | Nitric oxide synthase 2A | NOS2A |
| Marker 42 | Pancreatitis-associated protein | PAP |
| Marker 43 | Regenerating islet-derived 1 alpha | REG1A |
| Marker 44 | S100 calcium binding protein A9 | S100A9 |
| Marker 45 | Protein kinase C, eta | PRKCH |
| Marker 46 | Regulator of G-protein signalling 3 | RGS3 |
| Marker 47 | DNA-damage-inducible transcript 4 | DDIT4 |
| Marker 48 | Hypothetical protein FLJ12443 | FLJ12443 |

TABLE 3
UC Gene Expression Signature

| Marker | Gene | Symbol |
|---|---|---|
| Up- | | |
| Regulated | | |
| Marker 49 | Defensin, alpha 5, Paneth cell-specific | DEFA5 |
| Marker 50 | Ataxia telangiectasia mutated | ATM |
| Marker 51 | Chemokine (C—X—C motif) ligand 13 | CXCL13 |
| Marker 52 | B-factor, properdin | BF |
| Marker 53 | Complement component 4A | C4A |
| Marker 54 | Actin, beta | ACTB |
| Marker 55 | Nicotinamide N-methyltransferase | NNMT |
| Marker 56 | Melanoma inhibitory activity | MIA |
| Marker 57 | Sorting nexin 26 | SNX26 |
| Marker 58 | A disintegrin and metalloproteinase domain 5 | ADAM5 |
| Marker 59 | RNA binding motif protein 8A | RBM8A |
| Marker 60 | Tribbles homolog 2 (Drosophila) | TRIB2 |
| Down- | | |
| Regulated | | |
| Marker 61 | Cyclin G1 | CCNG1 |
| Marker 62 | Myeloid/lymphoid or mixed-lineage leukemia; | MLLT3 |
| | translocated to, 3 | |
| Marker 63 | Protein phosphatase 2 (formerly 2A), regulatory | PPP2R3A |
| | subunit B″, alpha | |
| Marker 64 | Pantothenate kinase 3 | PANK3 |
| Marker 65 | Dynein, axonemal, heavy polypeptide 9 | DNAH9 |
| Marker 66 | Guanine nucleotide binding protein, gamma | GNGT1 |
| | transducing activity polypeptide 1 | |
| Marker 67 | Coagulation factor II (thrombin) receptor-like 1 | F2RL1 |
| Marker 68 | Surfactant, pulmonary-associated protein D | SFTPD |
| Marker 69 | Solute carrier family 4, sodium bicarbonate | SLC4A4 |
| | cotransporter, member 4 | |
| Marker 70 | Gamma-aminobutyric acid (GABA) A receptor, | GABRG3 |
| | gamma 3 | |
| Marker 71 | Hydroxyprostaglandin dehydrogenase 15-(NAD) | HPGD |
| Marker 72 | TAF5-like RNA polymerase II, p300/CBP- | TAF5L |
| | associated factor (PCAF)-associated factor, | |
| | 65 kDa | |
| Marker 73 | Protein kinase, cAMP-dependent, catalytic, beta | PRKACB |
| Marker 74 | | DPM1 |
| Marker 75 | | SERP1 |

TABLE 4
Genes over-expressed in CD or UC affected tissues as compared
with healthy controls

| | | Symbol |
|---|---|---|
| | CD | |
| Marker 76 | Adrenomedullin | ADM |
| Marker 77 | Serum amyloid A1 | SAA1 |
| Marker 78 | Serine/cysteine proteinase inhibitor, | SERPINA1 |
| | clade A, 1 | |
| Marker 79 | Signal transducer and activator of | STAT1 |
| | transcription 1 | |
| Marker 80 | Signal transducer and activator of | STAT3 |
| | transcription 3 | |
| Marker 81 | Leukocyte Ig-like receptor, subfamily B, | LILRB1 |
| | member 1 | |
| Marker 82 | MHC, class II, DR beta 5 | HLA-DRB5 |
| Marker 83 | Transporter 1, ATP-binding cassette, | TAP1 |
| | sub-family B | |
| Marker 84 | Proteasome activator subunit 2 (PA28 beta) | PSME2 |
| Marker 85 | Proteasome subunit, beta type, 8 | PSMB8 |
| Marker 86 | Proteasome subunit, beta type, 9 | PSMB9 |
| Marker 87 | Proteasome subunit, beta type, 10 | PSMB10 |
| Marker 88 | Interferon, alpha-inducible protein (clone | G1P3 |
| | IFI-6-16) | |
| Marker 89 | Interferon induced transmembrane protein 1 | IFITM1 |
| | (9-27) | |
| Marker 90 | Interferon induced transmembrane protein 3 | IFITM3 |
| | (1-8 U) | |
| Marker 91 | Interferon stimulated gene 20 kDa | ISG20 |
| Marker 92 | Caspase 10 | CASP10 |
| Marker 93 | Mucin 4, tracheobronchial | MUC4 |
| Marker 94 | Regenerating islet-derived 1 beta | REG1B |
| Marker 95 | Mucin 1, transmembrane | MUC1 |
| Marker 96 | Serine protease inhibitor, Kazal type 4 | SPINK4 |
| Marker 97 | Lipin 1 | LPIN1 |
| | UC | |
| Marker 99 | Coronin, actin binding protein, 1A | CORO1A |
| Marker 100 | Matrix metalloproteinase 12 | MMP12 |
| Marker 101 | Platelet/endothelial cell adhesion molecule | PECAM1 |
| | (CD31) | |
| Marker 102 | Talin 1 | TLN1 |
| Marker 103 | Tissue inhibitor of metalloproteinase 1 | TIMP1 |
| Marker 104 | Interferon, gamma-inducible protein 30 | IFI30 |
| Marker 105 | POU domain, class 2, associating factor 1 | POU2AF1 |
| Marker 106 | Clusterin (complement lysis inhibitor, | CLU |
| | SP-40, 40) | |
| Marker 107 | TNF receptor superfamily, member 7 | TNFRSF7 |
| Marker 108 | Prostaglandin D2 synthase | PTGDS |
| Marker 109 | CD79A antigen (Ig-associated alpha) | CD79A |
| Marker 110 | Defensin, alpha 5, Paneth cell-specific | DEFA5 |
| Marker 111 | Ubiquitin D | UBD |
| Marker 112 | Chemokine (C-C motif) ligand 11 | CCL11 |
| Marker 113 | Insulin-like growth factor binding protein 5 | IGFBP5 |
| Marker 114 | Endothelial cell growth factor 1 (platelet- | ECGF1 |
| | derived) | |
| Marker 115 | Fascin homolog 1, actin-bundling protein | FSCN1 |
| Marker 116 | Ataxia telangiectasia mutated | ATM |
| Marker 117 | Notch homolog 3 (Drosophila) | NOTCH3 |
| Marker 118 | Protease inhibitor 3, skin-derived (SKALP) | PI3 |
| Marker 119 | Nucleoporin 210 | NIP210 |
| Marker 120 | AT rich interactive domain 5A (MRF1-like) | ARID5A |
| Marker 121 | Pyruvate dehydrogenase kinase, isoenzyme 3 | PDK3 |
| Marker 122 | Cathepsin H | CTSH |
| Marker 123 | Lymphocyte cytosolic protein 1 (L-plastin) | LCP1 |
| Marker 124 | Stomatin | STOM |

TABLE 5
Genes down-regulated in CD or UC as compared with healthy controls

| | | Symbol |
|---|---|---|
| | CD | |
| Marker 125 | Down syndrome critical region gene 1-like 1 | DSCR1L1 |
| Marker 126 | Spondin 1, extracellular matrix protein | SPON1 |
| Marker 127 | Thrombospondin 1 | THBS1 |
| Marker 128 | Chemokine (C—X—C motif) ligand 12 | CXCL12 |
| Marker 129 | Stathmin-like 2 | STMN2 |
| Marker 130 | Serine/cysteine proteinase inhibitor, clade B, 7 | SERPINB7 |
| Marker 131 | WEE1 homolog (S. pombe) | WEE1 |
| Marker 132 | Myosin, heavy polypeptide 11, smooth muscle | MYH11 |
| Marker 133 | Chromosome 14 ORF116 (checkpoint suppressor 1) | CHES1 |
| Marker 134 | Pre-B-cell leukemia transcription factor 3 | PBX3 |
| Marker 135 | Autism susceptibility candidate 2 | AUTS2 |
| Marker 136 | Poliovirus receptor-related 3 | PVRL3 |
| | UC | |
| Marker 137 | Semaphorin 6A-1 | SEMA6A |
| Marker 138 | KIAA0931 protein (PH domain and leucine rich Repeat protein | PHLPPL |
| | phosphatase-like) | |
| Marker 139 | Mitochondrial ribosomal protein S6 | MRPS6 |
| Marker 140 | Sterol-C5-desaturase (ERG3 delta-5-desaturase Homolog, fungal)- | SC5DL |
| | like | |
| Marker 141 | Related RAS viral (r-ras) oncogene homolog 2 | SCP2 |
| Marker 142 | UDP-glucose dehydrogenase | UGDH |
| Marker 143 | Calpastatin | CAST |
| Marker 144 | ADAM-like, decysin 1 | ADAMDEC1 |
| Marker 145 | Dynein, axonemal, heavy polypeptide 9 | DNAH9 |
| Marker 146 | Ephrin-A1 | EENA1 |
| Marker 147 | Fibroblast growth factor receptor 3 | FGFR3 |
| Marker 148 | Methylmalonyl Coenzyme A mutase | MUT |
| Marker 149 | Phosphoenolpyruvate carboxykinase 1 (soluble) | PCK1 |
| Marker 137 | Gamma-glutamyl hydrolase | GGH |
| Marker 138 | N-acylsphingosine amidohydrolase-like | ASAHL |
| Marker 139 | Acyl-Coenzyme A dehydrogenase, C-4 to C-12 straight chain | ACADM |
| Marker 140 | UDP glycosyltransferase 2 family, B28 | UGT2B28 |
| Marker 141 | Ectonucleoside triphosphate diphosphohydrolase 5 | ENTPD5 |
| Marker 142 | Ectonucleotide pyrophosphatase/phosphodiesterase 4 | ENPP4 |
| Marker 143 | Cisplatin resistance associated | MTMR11 |
| Marker 144 | aAcyl-Coenzyme A oxidase 1, palmitoyl | ACOX1 |
| Marker 145 | Neural precursor cell expressed, developmentally down-regulated 4- | NEDD4L |
| | like | |
| Marker 146 | Tetraspanin 7 (transmembrane 4 superfamily, 2) | TSPAN7 |
| Marker 147 | Protein tyrosine phosphatase, receptor type, R | PTPRR |
| Marker 148 | Vacuolar protein sorting 13A (yeast) | VPS13A |
| Marker 149 | Procollagen-lysine, 2-oxoglutarate 5-dioxygenase 2 | PLOD2 |
| Marker 150 | Dual-specificity tyrosine-(Y)-phosphorylation regulated kinase 2 | DYRK2 |
| Marker 151 | Guanylate cyclase activator 2A (guanylin) | GUCA2A |
| Marker 152 | Guanylate cyclase activator 2B (uroguanylin) | GUCA2B |
| Marker 153 | Sorcin | SRI |
| Marker 154 | Endothelin 3 | EDN3 |
| Marker 155 | Peroxiredoxin 6 | PRDX6 |
| Marker 156 | Selenium binding protein 1 | SELENBP1 |
| Marker 157 | A kinase (PRKA) anchor protein (yotiao) 9 | AKAP9 |
| Marker 158 | Phosphoinositide-3-kinase, regulatory subunit, polypeptide 1 (p85 | PIK3R1 |
| | alpha) | |
| Marker 159 | Coagulation factor II (thrombin) receptor-like 1 | F2RL1 |
| Marker 160 | Lectin, galactoside-binding, soluble, 2 (galectin 2) | LGALS2 |
| Marker 161 | | |
| Marker 162 | Chromodomain helicase DNA binding protein 1 | CHD1 |
| Marker 163 | Hepatocyte nuclear factor 4, gamma | HNF4G |
| Marker 164 | Myeloid/lymphoid or mixed-lineage leukemia (trithorax homolog, | MLLT2 |
| | Drosophila); translocated to, 2 | |
| Marker 165 | v-myb myeloblastosis viral oncogene homolog (avian) | MYB |
| Marker 166 | Nuclear receptor subfamily 3, group C, member 2 | NR3C2 |
| Marker 167 | SATB family member 2 | SATB2 |
| Marker 168 | Zinc finger protein 217 | ZNF217 |
| Marker 169 | Cyclin T2 | CCNT2 |
| Marker 170 | Kruppel-like factor 5 (intestinal) | KLF5 |
| Marker 171 | ATPase, Ca++ transporting, plasma membrane 1 | ATP2B1 |
| Marker 172 | Exophilin 5 | EXPH5 |
| Marker 173 | Solute carrier family 16, member 1 | SLC16A1 |
| Marker 174 | Secretory carrier membrane protein 1 | SCAMP1 |
| Marker 175 | Transportin 1 | TNPO1 |
| Marker 176 | Solute carrier family 26, member 2 | SLC26A2 |
| Marker 177 | Aquaporin 8 | AQP8 |
| Marker 178 | Peptidyl arginine deiminase, type II | — |
| Marker 179 | Cordon-bleu homolog (mouse) | COBL |
| Marker 180 | Family with sequence similarity 8, member A1 | FAM8A1 |
| Marker 181 | Hypothetical protein FLJ13910 | FLJ13910 |
| Marker 182 | GRP1-binding protein GRSP1(FERM domain containing 4B) | FRMD4B |
| Marker 183 | Histone 1, H4c | HIST1H4C |
| Marker 184 | Hepatocellular carcinoma antigen gene 520 | LOC63928 |
| Marker 185 | Hypothetical protein LOC92482 | LOC92482 |
| Marker 186 | FLJ11220 (round spermatid basic protein 1) | RSBN1 |

TABLE 6
Gene expression changes in CD and UC as compared
with healthy controls

| | | Symbol |
|---|---|---|
| | Up-regulated | |
| Marker 187 | Ig heavy constant gamma 4 (G4m marker) | IGHG4 |
| Marker 188 | MHC, class II, DM alpha | HLA-DMA |
| Marker 189 | MHC, class II, DR beta 1 | HLA-DRB1 |
| Marker 190 | Defensin, alpha 6, Paneth cell-specific | DEFA6 |
| Marker 191 | Chemokine (C—X—C motif) ligand 1 | CXCL1 |
| Marker 192 | Chemokine (C—X—C motif) ligand 2 | CXCL2 |
| Marker 193 | Chemokine (C—X—C motif) ligand 3 | CXCL3 |
| Marker 194 | Interleukin 8 | IL8 |
| Marker 195 | B-factor, properdin | BF |
| Marker 196 | Decay accelerating factor for complement | DAF |
| Marker 197 | Deleted in malignant brain tumors 1 | DMBT1 |
| Marker 198 | Lipocalin 2 (oncogene 24p3) | LCN2 |
| Marker 199 | Nitric oxide synthase 2A (inducible, | NOS2A |
| | hepatocytes) | |
| Marker 200 | Regenerating islet-derived 3 alpha | REG3A |
| Marker 201 | S100 calcium binding protein A9 (MRP14) | S100A9 |
| Marker 202 | Caspase 1 | CASP1 |
| Marker 203 | Peptidylprolyl isomerase D | PPID |
| Marker 204 | Pim-2 oncogene | PIM2 |
| Marker 205 | Regenerating islet-derived 1 alpha | REG1A |
| Marker 206 | Tryptophanyl-tRNA synthetase | WARS |
| Marker 207 | Regulator of G-protein signalling 3 | RGS3 |
| Marker 208 | Hypothetical protein FLJ12443 | FLJ12443 |
| Marker 209 | Protein serine kinase H1 | PSKH1 |
| Marker 210 | Ubiquitin-conjugating enzyme E2L 6 | UBE2L6 |
| Marker 211 | PDZK1 interacting protein 1 | PDZK1IP1 |
| | Down-regulated | |
| Marker 213 | Adducin 3 (gamma) | ADD3 |
| Marker 214 | Claudin 8 | CLDN8 |
| Marker 215 | Protein kinase C, iota | PRKCI |
| Marker 216 | UDP glycosyltransferase 8 | UGT8 |
| Marker 217 | BTB (POZ) domain containing 3 | BTBD3 |
| Marker 218 | Protein kinase C-like 2 | PKN2 |
| Marker 219 | Protein kinase, cAMP-dependent, | PRKACB |
| | catalytic, beta | |
| Marker 220 | ATP-binding cassette, sub-family B | ABCB1 |
| | (MDR/TAP), 1 | |
| Marker 221 | Solute carrier family 4, member 4 | SLC4A4 |
| Marker 222 | MAX interactor 1 | MXI1 |
| Marker 223 | Sp3 transcription factor | SP3 |
| Marker 224 | Frizzled-related protein | FRZB |
| Marker 225 | Fk506-Binding Protein, Alt. Splice 2 | — |
| Marker 226 | mRNA; cDNA DKFZp586B211 | — |
| Marker 227 | Chromosome 14 open reading frame 11 | C14orf11 |
| Marker 228 | Creatine kinase, brain | CKB |
| Marker 229 | Transcribed sequences | KIAA1651 |
| Marker 230 | Putative MAPK activating protein | TIPRL |

TABLE 7
Differential gene expression in affected CD compared to
healthy control

| | | Symbol |
|---|---|---|
| | Up-regulated Gene | |
| Marker 231 | Adrenomedullin | ADM |
| Marker 232 | Serum amyloid A1 | SAA1 |
| Marker 233 | Serine/cysteine proteinase inhibitor, | SERPINA1 |
| | clade A, 1 | |
| Marker 234 | Signal transducer and activator | STAT1 |
| | of transcription 1 | |
| Marker 235 | Signal transducer and activator | STAT3 |
| | of transcription 3 | |
| Marker 236 | MHC, class II, DR beta 5 | HLA-DRB5 |
| Marker 237 | Transporter 1, ATP-binding cassette, | TAP1 |
| | sub-family B | |
| Marker 238 | Proteasome activator subunit 2 (PA28 beta) | PSME2 |
| Marker 239 | Proteasome subunit, beta type, 8 | PSMB8 |
| Marker 240 | Proteasome subunit, beta type, 9 | PSMB9 |
| Marker 241 | Proteasome subunit, beta type, 10 | PSMB10 |
| Marker 242 | Interferon, alpha-inducible protein | G1P3 |
| | (clone IFI-6-16) | |
| Marker 243 | Leukocyte Ig-like receptor, subfamily B, | LILRB1 |
| | member 1 | |
| Marker 244 | Interferon induced transmembrane | IFITM1 |
| | protein 1 (9-27) | |
| Marker 245 | Interferon induced transmembrane | IFITM3 |
| | protein 3 (1-8U) | |
| Marker 246 | Interferon stimulated gene 20 kDa | ISG20 |
| Marker 247 | Caspase 10 | CASP10 |
| Marker 248 | Mucin 4, tracheobronchial | MUC4 |
| Marker 249 | Regenerating islet-derived 1 beta | REG1B |
| Marker 250 | Mucin 1, transmembrane | MUC1 |
| Marker 251 | Serine protease inhibitor, Kazal type 4 | SPINK4 |
| Marker 252 | Lipin 1 | LPIN1 |
| | Down-regulated | |
| Marker 253 | Down syndrome critical region gene 1-like 1 | DSCR1L1 |
| Marker 254 | Spondin 1, extracellular matrix protein | SPON1 |
| Marker 255 | Thrombospondin 1 | THBS1 |
| Marker 256 | Chemokine (C—X—C motif) ligand 12 | CXCL12 |
| Marker 257 | Stathmin-like 2 | STMN2 |
| Marker 258 | Serine/cysteine proteinase inhibitor, | SERPINB7 |
| | clade B, 7 | |
| Marker 259 | WEE1 homolog (S. pombe) | WEE1 |
| Marker 260 | Myosin, heavy polypeptide 11, | MYH11 |
| | smooth muscle | |
| Marker 261 | Chromosome 14 ORF116 | CHES1 |
| | (checkpoint suppressor 1) | |
| Marker 262 | Pre-B-cell leukemia transcription factor 3 | PBX3 |
| Marker 263 | Autism susceptibility candidate 2 | AUTS2 |
| Marker 264 | Poliovirus receptor-related 3 | PVRL3 |
| Marker 265 | | |

TABLE 8
Gene expression overlaps in CD and UC compared to healthy control

| | | Symbol |
|---|---|---|
| | Up-regulated | |
| Marker 266 | Ig heavy constant gamma 4 (G4m marker) | IGHG4 |
| Marker 267 | MHC, class II, DM alpha | HLA-DMA |
| Marker 268 | MHC, class II, DR beta 1 | HLA-DRB1 |
| Marker 269 | Defensin, alpha 6, Paneth cell-specific | DEFA6 |
| Marker 270 | Chemokine (C—X—C motif) ligand 1 | CXCL1 |
| Marker 271 | Chemokine (C—X—C motif) ligand 2 | CXCL2 |
| Marker 272 | Chemokine (C—X—C motif) ligand 3 | CXCL3 |
| Marker 273 | Interleukin 8 | IL8 |
| Marker 274 | B-factor, properdin | BF |
| Marker 275 | Decay accelerating factor for complement | DAF |
| Marker 276 | Deleted in malignant brain tumors 1 | DMBT1 |
| Marker 277 | Lipocalin 2 (oncogene 24p3) | LCN2 |
| Marker 278 | Nitric oxide synthase 2A (inducible, hepatocytes) | NOS2A |
| Marker 279 | Regenerating islet-derived 3 alpha | REG3A |
| Marker 280 | S100 calcium binding protein A9 (MRP14) | S100A9 |
| Marker 281 | Caspase 1 | CASP1 |
| Marker 282 | Peptidylprolyl isomerase D (Cyclophilin D) | PPID |
| Marker 283 | Pim-2 oncogene | PIM2 |
| Marker 284 | Regenerating islet-derived 1 alpha | REG1A |
| Marker 285 | Tryptophanyl-tRNA synthetase | WARS |
| Marker 286 | Regulator of G-protein signalling 3 | RGS3 |
| Marker 287 | Hypothetical protein FLJ12443 | FLJ12443 |
| Marker 288 | Protein serine kinase H1 | PSKH1 |
| Marker 289 | Ubiquitin-conjugating enzyme E2L 6 | UBE2L6 |
| Marker 290 | PDZK1 interacting protein 1 For Peer Review | PDZK1IP1 |
| | Down-regulated | |
| Marker 291 | Adducin 3 (gamma) | ADD3 |
| Marker 292 | Claudin 8 Protein kinase C, iota | CLDN8 PRKCI |
| Marker 293 | UDP glycosyltransferase 8 | UGT8 |
| Marker 294 | BIB (POZ) domain containing 3 | BTBD3 |
| Marker 295 | Protein kinase C-like 2 | PKN2 |
| Marker 296 | Protein kinase, cAMP-dependent, catalytic, beta | PRKACB |
| Marker 297 | ATP-binding cassette, sub-family B (MDR/TAP), 1 Solute | ABCB1 SLC4A4 |
| | carrier family 4, member 4 | |
| Marker 298 | MAX interactor 1 | MXI1 |
| Marker 299 | Sp3 transcription factor | SP3 |
| Marker 300 | Frizzled-related protein | FRZB |
| Marker 301 | Fk506-Binding Protein, Alt. Splice 2 | — |
| Marker 302 | mRNA; cDNA DKFZp586B211 | — |
| Marker 303 | Chromosome 14 open reading frame 11 | C14orf11 |
| Marker 304 | Creatine kinase, brain | CKB |
| Marker 305 | Transcribed sequences | KIAA1651 |
| Marker 306 | Putative MAPK activating protein | TIPRL |

TABLE 9
Differential gene expression in affected UC tissues compared to healthy control

| | | Symbol |
|---|---|---|
| | Up-regulated Gene | |
| Marker 307 | Coronin, actin binding protein, 1A | CORO1A |
| Marker 308 | Matrix metalloproteinase 12 | MMP12 |
| Marker 309 | Platelet/endothelial cell adhesion molecule (CD31) | PECAM1 |
| Marker 310 | Talin 1 | TLN1 |
| Marker 311 | Tissue inhibitor of metalloproteinase 1 | TIMP1 |
| Marker 312 | Interferon, gamma-inducible protein 30 | IFI30 |
| Marker 313 | POU domain, class 2, associating factor 1 | POU2AF1 |
| Marker 314 | Clusterin (complement lysis inhibitor, SP-40,40) | CLU |
| Marker 315 | TNF receptor superfamily, member 7 | TNFRSF7 |
| Marker 316 | Prostaglandin D2 synthase | PTGDS |
| Marker 317 | CD79A antigen (Ig-associated alpha) For Peer Review | CD79A |
| Marker 318 | Defensin, alpha 5, Paneth cell-specific | DEFA5 |
| Marker 319 | Ubiquitin D | UBD |
| Marker 320 | Chemokine (C-C motif) ligand 11 | CCL11 |
| Marker 321 | Insulin-like growth factor binding protein 5 | IGFBP5 |
| Marker 322 | Endothelial cell growth factor 1 (platelet-derived) | ECGF1 |
| Marker 323 | Fascin homolog 1, actin-bundling protein | FSCN1 |
| Marker 324 | Ataxia telangiectasia mutated | ATM |
| Marker 325 | Notch homolog 3 (Drosophila) | NOTCH3 |
| Marker 326 | Protease inhibitor 3, skin-derived (SKALP) | PI3 |
| Marker 327 | Nucleoporin 210 | NIP210 |
| Marker 328 | AT rich interactive domain 5A (MRF1-like) | ARID5A |
| Marker 329 | Pyruvate dehydrogenase kinase, isoenzyme 3 | PDK3 |
| Marker 330 | Cathepsin H | CTSH |
| Marker 331 | Lymphocyte cytosolic protein 1 (L-plastin) | LCP1 |
| Marker 332 | Stomatin | STOM |
| | Down-regulated | |
| Marker 333 | Semaphorin 6A-1 | SEMA6A |
| Marker 334 | KIAA0931 protein (PH domain and leucine rich | PHLPPL |
| Marker 335 | Repeat protein phosphatase-like) | |
| Marker 336 | Mitochondrial ribosomal protein S6 | MRPS6 |
| Marker 337 | Sterol-C5-desaturase (ERG3 delta-5-desaturase | SC5DL |
| Marker 338 | Homolog, fungal)-like | |
| Marker 339 | Related RAS viral (r-ras) oncogene homolog 2 | SCP2 |
| Marker 340 | UDP-glucose dehydrogenase | UGDH |
| Marker 341 | Calpastatin | CAST |
| Marker 342 | ADAM-like, decysin 1 | ADAMDEC1 |
| Marker 343 | Dynein, axonemal, heavy polypeptide 9 | DNAH9 |
| Marker 344 | Ephrin-A1 | EFNA1 |
| Marker 345 | Fibroblast growth factor receptor 3 | FGFR3 |
| Marker 346 | Methylmalonyl Coenzyme A mutase | MUT |
| Marker 347 | Phosphoenolpyruvate carboxykinase 1 (soluble) | PCK1 |
| Marker 348 | Gamma-glutamyl hydrolase | GGH |
| Marker 349 | N-acylsphingosine amidohydrolase-like | ASAHL |
| Marker 350 | Acyl-Coenzyme A dehydrogenase, | ACADM |
| Marker 351 | UDP glycosyltransferase 2 family, B28 | UGT2B28 |
| Marker 352 | Ectonucleoside triphosphate diphosphohydrolase 5 | ENTPD5 |
| Marker 353 | Ectonucleotide pyrophosphatase/phosphodiesterase 4 | ENPP4 |
| Marker 354 | Cisplatin resistance associated | MTMR11 |
| Marker 355 | aAcyl-Coenzyme A oxidase 1, palmitoyl | ACOX1 |
| Marker 356 | Neural precursor cell expressed, developmentally | NEDD4L |
| Marker 357 | down-regulated 4-like | |
| Marker 358 | Tetraspanin 7 (transmembrane 4 superfamily, 2) | TSPAN7 |
| Marker 359 | Protein tyrosine phosphatase, receptor type, R | PTPRR |
| Marker 360 | Vacuolar protein sorting 13A (yeast) | VPS13A |
| Marker 361 | Procollagen-lysine, 2-oxoglutarate 5-dioxygenase 2 | PLOD2 |
| Marker 362 | Dual-specificity tyrosine-(Y)-phosphorylation | DYRK2 |
| Marker 363 | regulated kinase 2 | |
| Marker 364 | Guanylate cyclase activator 2A (guanylin) | GUCA2A |
| Marker 365 | Guanylate cyclase activator 2B (uroguanylin) | GUCA2B |
| Marker 366 | Sorcin | SRI |
| Marker 367 | Endothelin 3 | EDN3 |
| Marker 368 | Peroxiredoxin 6 | PRDX6 |
| Marker 369 | Selenium binding protein 1 | SELENBP1 |
| Marker 370 | A kinase (PRKA) anchor protein (yotiao) 9 | AKAP9 |
| Marker 371 | Phosphoinositide-3-kinase, regulatory subunit, | PIK3R1 |
| Marker 372 | polypeptide 1 (p85 alpha) For Peer Review | |
| Marker 373 | Coagulation factor II (thrombin) receptor-like 1 | F2RL1 |
| Marker 374 | Lectin, galactoside-binding, soluble, 2 (galectin 2) | LGALS2 |
| Marker 375 | Chromodomain helicase DNA binding protein 1 | CHD1 |
| Marker 376 | Hepatocyte nuclear factor 4, gamma | HNF4G |
| Marker 377 | Myeloid/lymphoid or mixed-lineage leukemia | MLLT2 |
| Marker 378 | (trithorax homolog, Drosophila); translocated to, 2 | |
| Marker 379 | v-myb myeloblastosis viral oncogene homolog (avian) | MYB |
| Marker 380 | Nuclear receptor subfamily 3, group C, member 2 | NR3C2 |
| Marker 381 | SATB family member 2 | SATB2 |
| Marker 382 | Zinc finger protein 217 | ZNF217 |
| Marker 383 | Cyclin T2 | CCNT2 |
| Marker 384 | Kruppel-like factor 5 (intestinal) | KLF5 |
| Marker 385 | ATPase, Ca++ transporting, plasma membrane 1 | ATP2B1 |
| Marker 386 | Exophilin 5 | EXPH5 |
| Marker 387 | Solute carrier family 16, member 1 | SLC16A1 |
| Marker 388 | Secretory carrier membrane protein 1 | SCAMP1 |
| Marker 389 | Transportin 1 | TNPO1 |
| Marker 390 | Solute carrier family 26, member 2 | SLC26A2 |
| Marker 391 | Aquaporin 8 | AQP8 |
| Marker 392 | Peptidyl arginine deiminase, type II | — |
| Marker 393 | Cordon-bleu homolog (mouse) | COBL |
| Marker 394 | Family with sequence similarity 8, member A1 | FAM8A1 |
| Marker 395 | Hypothetical protein FLJ13910 | FLJ13910 |
| Marker 396 | GRP1-binding protein GRSP1(FERM domain | FRMD4B |
| Marker 397 | containing 4B) | |
| Marker 398 | Histone 1, H4c | HIST1H4C |
| Marker 399 | Hepatocellular carcinoma antigen gene 520 | LOC63928 |
| Marker 400 | Hypothetical protein LOC92482 | LOC92482 |
| Marker 401 | FLJ11220 (round spermatid basic protein 1) | RSBN1 |

[0036] Markers of the invention may be detected, for example, by mass spectrometry according to one embodiment. In a related embodiment, the markers are detected by SELDI. In another related embodiment, the marker or markers are detected by capturing the marker on a biochip having a hydrophobic surface and detecting the captured marker by SELDI. Suitable biochips include the IMAC3 ProteinChip® Array and the WCX2 ProteinChip® Array. In another related embodiment, markers are detected by nucleic acid arrays, e.g., DNA arrays or by PCR methods.

[0037] In one embodiment, the methods for qualifying inflammatory bowel disease status in a subject further comprise generating data on immobilized subject samples on a biochip, by subjecting the biochip to laser ionization and detecting intensity of signal for mass/charge ratio; and transforming the data into computer readable form; executing an algorithm that classifies the data according to user input parameters, for detecting signals that represent biomarkers present in inflammatory bowel disease subjects and are lacking in non-inflammatory bowel disease subject controls.

[0038] In one embodiment, one or more of the biomarkers are detected using laser desorption/ionization mass spectrometry, comprising providing a probe adapted for use with a mass spectrometer comprising an adsorbent attached thereto; contacting the subject sample with the adsorbent; desorbing and ionizing the biomarker or biomarkers from the probe; and detecting the desorbed/ionized markers with the mass spectrometer.

[0039] In one embodiment, least one or more protein biomarkers are detected using immunoassays.

[0040] In one embodiment, the sample from the subject is one or more of colon biopsy material, intestinal biopsy material, fecal material, blood, blood plasma, serum, urine, cells, organs, seminal fluids, bone marrow, saliva, stool, a cellular extract, a tissue sample, a tissue biopsy, and cerebrospinal fluid.

[0041] In one embodiment, the methods for qualifying inflammatory bowel disease status in a subject further comprise measuring the amount of each biomarker in the subject sample and determining the ratio of the amounts between the markers. In a related embodiment, the measuring is selected from detecting the presence or absence of the biomarkers(s), quantifying the amount of marker(s), and qualifying the type of biomarker. In one embodiment, at least two biomarkers are measured. In a related embodiment, at least three biomarkers are measured. In another embodiment, at least four biomarkers are measured. In yet another embodiment, at least one UC and at least one CD biomarker is measured.

[0042] In one embodiment, the protein biomarkers are measured by one or more of electrospray ionization mass spectrometry (ESI-MS), ESI-MS/MS, ESI-MS/(MS)ⁿ, matrix-assisted laser desorption ionization time-of-flight mass spectrometry (MALDI-TOF-MS), surface-enhanced laser desorption/ionization time-of-flight mass spectrometry (SELDI-TOF-MS), desorption/ionization on silicon (DIOS), secondary ion mass spectrometry (SIMS), quadrupole time-of-flight (Q-TOF), atmospheric pressure chemical ionization mass spectrometry (APCI-MS), APCI-MS/MS, APCI-(MS).sup.n, atmospheric pressure photoionization mass spectrometry (APPI-MS), APPI-MS/MS, and APPI-(MS)ₙ, quadrupole mass spectrometry, fourier transform mass spectrometry (FTMS), and ion trap mass spectrometry, where n is an integer greater than zero.

[0043] In one embodiment, the correlating is performed by a software classification algorithm.

[0044] The invention provides kits, for example, for aiding the diagnosis of inflammatory bowel disease or the diagnosis of the subtypes of inflammatory bowel disease. The kits may suitably include an adsorbent, wherein the adsorbent retains one or more biomarkers selected from one or more of the markers of Tables 1-9, and written instructions for use of the kit for detection of inflammatory bowel disease.

[0045] In one embodiment, the kit for aiding the diagnosis of the subtypes of inflammatory bowel disease, comprises an adsorbent, wherein the adsorbent retains one or more biomarkers selected from each of Markers 1-48 and Markers 49-75, and written instructions for use of the kit for detection of the IBD or a subtype of inflammatory bowel disease, e.g., UC or CD.

[0046] Kits may also comprise instructions provide for contacting a test sample with the adsorbent and detecting one or more biomarkers retained by the adsorbent, wherein the adsorbent is, for example, an antibody, single or double stranded oligonucleotide, amino acid, protein, peptide or fragments thereof.

[0047] In one embodiment, the one or more protein biomarkers is detected using mass spectrometry, immunoassays, or PCR. In another embodiment, the measuring is selected from detecting the presence or absence of the biomarkers(s), quantifying the amount of marker(s), and qualifying the type of biomarker.

[0048] In one aspect, the invention provides methods for identifying a candidate compound for treating inflammatory bowel disease comprising contacting one or more of the biomarkers of Tables 1-9 with a test compound; and determining whether the test compound interacts with the biomarker, wherein a compound that interacts with the biomarker is identified as a candidate compound for treating inflammatory bowel disease.

[0049] The invention also provides methods of treating inflammatory bowel disease comprising administering to a subject suffering from or at risk of developing inflammatory bowel disease a therapeutically effective amount of a compound capable of modulating the expression or activity of one or more of the biomarkers of Tables 1-9. In another aspect, the invention provides methods of treating a condition in a subject comprising administering to a subject a therapeutically effective amount of a compound which modulates the expression or activity of one or more of the biomarkers of Tables 1-9.

[0050] In certain embodiments, the compound are selected from the group consisting of enzyme inhibitor, cytotoxic drug, cytokin, chemokine, antibodies, a DNA molecule, an RNA molecule, a small molecule, a peptide, and a peptidomimetic. Classes of drugs include, anti-inflammatory, antibiotic, antiviral, antidepressant, anticonvulsant therapeutics.

[0051] According to one aspect, the invention provides methods for modulating the concentration of a biomarker, wherein the biomarker is one or more of the biomarkers listed in Tables 1-9. The method comprises contacting a cell with a test compound, measuring at least one biomarker, wherein the biomarker is selected from one or more of the biomarkers of Tables 1-9, and correlating the measurement with a determination of efficacy.

[0052] The invention also provides, in one aspect, a method of identifying a biomarker comprising obtaining an endoscopic sample from a subject, isolating nucleic acid from the sample, analyzing the nucleic acid and correlating the results. The results may be analyzed against a control database of IBD samples and/or controls.

[0053] The invention also provides methods of determining the inflammatory bowel disease status of a subject, comprising (a) obtaining a biomarker profile from a sample taken from the subject; and (b) comparing the subject's biomarker profile to a reference biomarker profile obtained from a reference population, wherein the comparison is capable of classifying the subject as belonging to or not belonging to the reference population; wherein the subject's biomarker profile and the reference biomarker profile comprise one or more markers listed in Tables 1-9.

[0054] In one embodiment, the comparison of the biomarker profiles can determine inflammatory bowel disease status in the subject with an accuracy of at least about 60%, 70%, 80%, 90% or approaching 100%.

[0055] In certain embodiments, the sample is fractionated by one or more of chemical extraction partitioning, ion exchange chromatography, reverse phase liquid chromatography, isoelectric focusing, one-dimensional polyacrylamide gel electrophoresis (PAGE), two-dimensional polyacrylamide gel electrophoresis (2D-PAGE), thin-layer chromatography, gas chromatography, liquid chromatography, and any combination thereof.

[0056] In other methods, the measuring step comprises quantifying the amount of marker(s) in the sample. In other methods, the measuring step comprises qualifying the type of biomarker in the sample.

[0057] When the identity of a markers is not yet known, the biomarkers may be sufficiently characterized by, e.g., mass and by affinity characteristics. It is noted that molecular weight and binding properties are characteristic properties of the markers and not limitations on means of detection or isolation. Furthermore, using the methods described herein or other methods known in the art, the absolute identity of markers can be determined.

[0058] The present invention also relates to biomarkers designated as Markers 1-97, 99-211, 213-264, 266-401. Protein markers of the invention can be characterized in one or more of several respects. In particular, in one aspect, these markers are characterized by molecular weights under the conditions specified herein, particularly as determined by mass spectral analysis. In another aspect, the markers can be characterized by features of the markers' mass spectral signature such as size (including area) and/or shape of the markers' spectral peaks, features including proximity, size and shape of neighboring peaks, etc. In yet another aspect, the markers can be characterized by affinity binding characteristics, particularly ability to binding to cation-exchange and/or hydrophobic surfaces. In preferred embodiments, markers of the invention may be characterized by each of such aspects, i.e. molecular weight, mass spectral signature and cation and/or hydrophobic absorbent binding.

[0059] Accuracy and resolution variances associated with the techniques described herein are reflected in the use of the term “about” in the disclosure.

[0060] In a preferred embodiment, the present invention provides for a method for detecting and diagnosing (including e.g., differentiating between) different subtypes of inflammatory bowel disease, wherein the method comprises using a biochip array for detecting at least one biomarker in a subject sample; evaluating at least one biomarker in a subject sample, and correlating the detection of one or more protein biomarkers with a inflammatory bowel disease subtype, e.g., UC and CD.

[0061] The biomarkers of the invention may be detected in samples of blood, blood plasma, serum, urine, tissue, cells, organs, seminal fluids, bone marrow, colon biopsies, intestinal biopsies, and cerebrospinal fluid.

[0062] Preferred detection methods include use of a biochip array. Biochip arrays useful in the invention include protein and nucleic acid arrays. One or more markers are captured on the biochip array and subjected to laser ionization to detect the molecular weight of the markers. Analysis of the markers is, for example, by molecular weight of the one or more markers against a threshold intensity that is normalized against total ion current.

[0063] In preferred methods of the present invention, the step of correlating the measurement of the biomarkers with inflammatory bowel disease status is performed by a software classification algorithm. Preferably, data is generated on immobilized subject samples on a biochip array, by subjecting the biochip array to laser ionization and detecting intensity of signal for mass/charge ratio; and transforming the data into computer readable form; and executing an algorithm that classifies the data according to user input parameters, for detecting signals that represent markers present in inflammatory bowel disease subjects and are lacking in non-inflammatory bowel disease subject controls.

[0064] Preferably the biochip surfaces are, for example, ionic, anionic, hydrophobic; comprised of immobilized nickel or copper ions, comprised of a mixture of positive and negative ions; and/or comprised of one or more antibodies, single or double stranded nucleic acids, proteins, peptides or fragments thereof, amino acid probes, or phage display libraries.

[0065] In other preferred methods one or more of the markers are measured using laser desorption/ionization mass spectrometry, comprising providing a probe adapted for use with a mass spectrometer comprising an adsorbent attached thereto, and contacting the subject sample with the adsorbent, and desorbing and ionizing the marker or markers from the probe and detecting the deionized/ionized markers with the mass spectrometer.

[0066] Preferably, the laser desorption/ionization mass spectrometry comprises: providing a substrate comprising an adsorbent attached thereto; contacting the subject sample with the adsorbent; placing the substrate on a probe adapted for use with a mass spectrometer comprising an adsorbent attached thereto; and desorbing and ionizing the marker or markers from the probe and detecting the desorbed/ionized marker or markers with the mass spectrometer.

[0067] The adsorbent can for example be, hydrophobic, hydrophilic, ionic or metal chelate adsorbent, such as nickel or copper, or an antibody, single- or double stranded oligonucleotide, amino acid, protein, peptide or fragments thereof.

[0068] In another embodiment, a process for purification of a biomarker, comprising fractioning a sample comprising one or more protein biomarkers by size-exclusion chromatography and collecting a fraction that includes the one or more biomarker; and/or fractionating a sample comprising the one or more biomarkers by anion exchange chromatography and collecting a fraction that includes the one or more biomarkers. Fractionation is monitored for purity on normal phase and immobilized nickel arrays. Generating data on immobilized marker fractions on an array is accomplished by subjecting the array to laser ionization and detecting intensity of signal for mass/charge ratio; and transforming the data into computer readable form; and executing an algorithm that classifies the data according to user input parameters, for detecting signals that represent markers present in inflammatory bowel disease subjects and are lacking in non-inflammatory bowel disease subject controls. Preferably fractions are subjected to gel electrophoresis and correlated with data generated by mass spectrometry. In one aspect, gel bands representative of potential markers are excised and subjected to enzymatic treatment and are applied to biochip arrays for peptide mapping.

[0069] In another aspect one or more biomarkers are selected from gel bands representing Markers 1-97, 99-211, 213-264, 266-401 described herein.

[0070] Purified proteins for detection of inflammatory bowel disease and/or screening and aiding in the diagnosis of inflammatory bowel disease and/or generation of antibodies for further diagnostic assays are provided.

[0071] In further embodiments, the invention provides methods for identifying compounds (e.g., antibodies, nucleic acid molecules (e.g., DNA, RNA), small molecules, peptides, and/or peptidomimetics) capable of treating inflammatory bowel disease comprising contacting at least one or more of a biomarker selected from Markers 1-97, 99-211, 213-264, 266-401, and combinations thereof with a test compound; and determining whether the test compound interacts with, binds to, or modulates the biomarker, wherein a compound that interacts with, binds to, or modulates the biomarker is identifies as a compound capable of treated inflammatory bowel disease.

[0072] In another embodiment, the invention provides methods of treating inflammatory bowel disease comprising administering to a subject suffering from or at risk of developing inflammatory bowel disease a therapeutically effective amount of a compound (e.g., an antibody, nucleic acid molecule (e.g., DNA, RNA), small molecule, peptide, and/or peptidomimetic) capable of modulating the expression or activity of one or more of the Biomarkes 1-75.

[0073] In one aspect, the invention provides methods of determining the inflammatory bowel disease status of a subject, comprising (a) obtaining a biomarker profile from a sample taken from the subject; and (b) comparing the subject's biomarker profile to a reference biomarker profile obtained from a reference population, wherein the comparison is capable of classifying the subject as belonging to or not belonging to the reference population; wherein the subject's biomarker profile and the reference biomarker profile comprise one or more markers listed in Tables 1-9.

[0074] Methods of the invention, one embodiment, may further comprise repeating the method at least once, wherein the subject's biomarker profile is obtained from a separate sample taken each time the method is repeated.

[0075] In another embodiment, samples from the subject are taken about 24, 30, 48, 60, and/or 72 hours apart.

[0076] In another embodiment, the comparison of the biomarker profiles can determine inflammatory bowel disease status in the subject with an accuracy of at least about 60% to about 99%.

[0077] In one embodiment, the reference biomarker profile is obtained from a population comprising a single subject, at least two subjects, and at least 20 subjects.

[0078] Thus, the methods of the present invention provide and solve the need for methods of accurately assessing, i.e., diagnostically, prognostically, and therapeutically, IBD, including UC and CD.

[0079] Other embodiments of the invention are disclosed infra.

### BRIEF DESCRIPTION OF THE DRAWINGS

[0080] FIG. 1 depicts gene expression signals from CD-76-aff-1 (X axis) and CD-76-aff-2 (Y axis) biopsies from one affected area. Each point represents the expression value of a probe set (defining a gene) in log-scale in the two biopsies. A probe set with a “Present” call in both arrays (red), “Absent” in both (yellow), and “Present” in either one of the two arrays (blue) is shown. The diagonal lines indicate fold change of 2, 3, and 10 in expression levels between two arrays. For genes expressed differentially between the two arrays, change in expression must be ≧2 fold, expression ≧100 arbitrary units, and “Present call” in one sample.

[0081] FIG. 2 depicts multidimensional scaling (MDS) of 32 samples. In a four dimensional representation of the data we compared the dimensions in a pair-wise fashion. A plot of component1 versus component 2 is shown, divided into four quadrants (Q1-Q4). Healthy controls: black open circles, CD affected: solid blue triangles, CD unaffected: open blue triangle, UC affected: red solid square, UC unaffected: open red square. Each affected is linked to its corresponding unaffected sample by a line. The affected IBD biopsies fall primarily in Q 1 and Q4, normal and several unaffected CD appear in Q2 and Q3, with unaffected UC biopsy profiles localizing to Q3.

[0082] FIG. 3 depicts hierarchical clustering across all arrays, of the top 50 genes whose expression patterns correlate with the distribution of samples in the MDS plot of FIG. 2. The inflammation score (*) for each biopsy taken from Tables 1-9 are shown on the top. Genes with similar expression levels across samples are clustered vertically and samples with similar gene expression patterns are grouped horizontally. Genes expressed above mean (red), mean (black) and below mean (green) are as shown. To derive this set of genes, each sample was assigned to one of four groups, depending on which quadrant it occupied in the MDS map, and an analysis of variance (ANOVA) on the expression values for each gene was calculated. Genes with large F-statistics have strong quadrant specific differences in expression. The top 50 genes with the highest F-statistic scores are shown.

[0083] FIG. 4 is a model showing distinct pathogenic events in UC and CD. Gene symbols are taken from Tables 2, 3 and FIG. 4. Gene up regulations and down regulations are indicated by arrows. We speculate that in response to microbial and other environmental stimuli, CD shows a deregulated immune response that entails acute phase response, antigen presentation and macrophage activation. In contrast early events in UC suggest impaired detoxification, overload of unfolded proteins and endoplasmic reticulum stress.

[0084] FIG. 5 depicts histology of endoscopic biopsies of colon from a healthy control (A), CD-76, a patient with Crohn's disease (B and C), and UC-55, a patient with ulcerative colitis (D). (B) is taken from unaffected mucosa showing essentially normal colon structures. (C), a view of CD76 affected biopsy, showing significant inflammatory infiltration in the mucosa and submucosa, cryptitis with crypt abscesses, and basal lymphoplasmacytosis (inflammation grade: ++). (D), UC-55 affected demonstrates crypt distortion and dropout, and lamina propria fibrosis (fibrosis grade: ++). MM: muscularis mucosa (*), SM: submucosa. H&E staining, original magnification 40×.

[0085] FIG. 6 depicts the expressions of selected genes that were quantified by real-time RT-PCR. The relative expression value of a gene was normalized to that of GAPD. The samples include unaffected (un) and affected (aff) sample from six CD cases (CD-33, 51, 53, 58, 59 and 76), five UC samples (UC-32, 35, 38, 44 and 55) and four from normal controls (N65, N66, N69 and N79). Each point represents an individual sample. Gene symbols are CXCL1: chemokine (C-X-C motif) ligand 1, DMBT1: deleted in malignant brain tumors 1, ADM: adrenomedullin, STAT3: signal transducer and activator of transcription 3, ASMT: acetylserotonin 0-methyltransferase, IFI35: interferon-induced protein 35, PSME2: proteasome activator subunit 2, and PSMB8: proteasome subunit, beta type, 8. The horizontal bar indicates the mean value of each group.

[0086] FIG. 7 depicts multidimensional scaling (MDS) of 36 samples. In a four dimensional representation of the data we compared the dimensions (components) in a pair-wise fashion. (A): A plot of component 1 versus component 2 is shown, divided into four quadrants (Q1-Q4). Solid symbols: disease affected samples, open symbols: unaffected, asterisk: healthy controls. Each “affected” sample is linked to its corresponding “unaffected” sample by a line. The “affected” samples fall primarily in Q 1 and Q4, while the “unaffected” and healthy controls appear in Q2 and Q3. (B): A plot of component 2 versus component 3 is shown. The disease-affected biopsies appear on left of the vertical line (Q 1 and Q2), the unaffected and healthy samples appear on the right side of vertical line. The two acute infectious colitis (INF156, INF157) samples appear together and separate from the CD and UC samples.

[0087] FIG. 8 shows confirmation of upregulation of selected genes by quantitative real-time RT-PCR. The genes were randomly selected from Table 2 and 3, including PSME2 (proteasome activator subunit 2), PSMB8 (proteasome subunit, beta type 8), ADM (adrenomedullin), STAT3 (signal transducer and activator of transcription 3), DMBT1 (deleted in malignant brain tumors 1) and CXCL1 (chemokine C-X-C-motif ligand 1). The relative expression value of a gene was normalized to that of GAPDH. The samples include unaffected (un) and affected (aff) sample from six CD cases (CD-33, 49, 51, 53, 58 and 76), four UC samples (UC-32, 35, 38 and 55) and four controls from healthy individuals (N65, N66, N69 and N79). Each point represents an individual sample. The horizontal bar indicates the mean value for each group.

[0088] FIG. 9 shows hierarchical clustering of genes differentially expressed in IBD and acute infectious colitis. (A) Gene expression differences between CD affected and bacterial infectious colitis (INF-156 and -157) samples were identified using the SAM software (Methods). (B) Genes differentially expressed in UC affected and bacterial infectious colitis samples are showed Genes expressed above mean (red), mean (black) and below mean (green) are as shown.

[0089] FIG. 10 shows hierarchical clustering of genes differentially expressed in IBD unaffected and healthy control samples, using SAM software (Methods). The expression patterns of these genes in CD and UC unaffected samples, and normal controls are shown as above mean (red), mean (black) and below mean (green) are as shown. Gene symbols in colored boxes indicate genes that were also identified by SAM as down-regulated in CD and/or UC affected tissue (blue: in both CD and UC, yellow: in CD, brown: in UC).

[0090] FIG. 11 shows histology of endoscopic biopsies of colon from a healthy control (A), CD-76, a patient with Crohn's disease (B and C), and UC-55, a patient with ulcerative colitis (D). (B) is taken from unaffected mucosa showing essentially normal colon structures. (C), a view of CD76 affected biopsy, showing significant inflammatory infiltration in the mucosa and submucosa, cryptitis with crypt abscesses, and basallymphoplasmacytosis (inflammation grade: ++). (D), UC-55 affected demonstrates crypt distortion and dropout, and laminapropriafibrosis (fibrosis grade: ++). MM: muscularis mucosa(*), SM: submucosa. H&E staining, original magnification 40×.

[0091] FIG. 12 shows gene expression signals from CD-76-aff-1 (X axis) and CD-76-aff-2 (Y axis) biopsies from one affected area. Each point represents the expression value of a probe set (defining a gene) in log-scale in the two biopsies. A probe set with a “Present” call in both arrays (red), “Absent” in both (yellow), and “Present” in either one of the two arrays (blue) is shown. The diagonal lines indicate fold change of 2, 3, and 10 in expression levels between two arrays. For genes expressed differentially between the two arrays, change in expression must be ≧2 fold, expression³ 100 arbitrary units, and “Present call” in one sample.

[0092] FIG. 13 shows expression of TAP1 (transporter 1, ATP-binding cassette, sub-family B) protein incolonicbiopsies. TAP1 protein was detected by immunohistochemistry using a polyclonal anti-human TAP1 antibody. Representative views are shown for colonoscopic biopsies taken from a healthy control (A), two patients with CD (B and C), and a patient with UC (D). Detail on patient demographics is included in supplementary Table s2. Positive reaction (brown) is seen in cytoplasma of mononuclear cells (arrows) and some epithelial cells (arrowheads).

[0093] FIG. 14—depicts unsupervised cluster analysis by multidimensional scaling. In a four dimensional representation of the data we compared the dimensions (components) in a pair-wise fashion. (A): A plot of component 1 versus component 2 is shown, divided into four quadrants (Q1-Q4). CD: Crohn's disease, UC: ulcerative colitis, INF: infectious colitis, IC: indeterminate colitis, number next to each code denotes specific cases, detailed information for which are in Table 1. Solid symbols: disease affected samples, open symbols: unaffected, asterisk: healthy controls. Each “affected” sample is linked to its corresponding “unaffected” sample by a line. In general “affected” samples appear to separate along component 2 axis, placed in Q 1 and Q4, while the “unaffected” and healthy controls appear below the horizontal axis, in Q2 and Q3. (B): A plot of component 2 versus component 3 is shown. The disease-affected biopsies appear on left of the vertical line (Q 1 and Q2), the unaffected and healthy samples appear on the right side of vertical line. The two acute infectious colitis (INF156, INF157) samples appear together and separated from CD and UC. (C): Site of biopsy is shown for each sample in the first component 2 versus component1 plot. Rm: rectum, S: sigmoid colon, DC: descending colon, SF: splenic flexure, TC: transverse colon, HF: hepatic flexure, AC: ascending colon, Ce: cecum.

[0094] FIG. 15 depicts heat image of all differentially expressed genes in IBD and INF compared to normal controls. Green denotes below mean (black) and red above mean relative gene expression. Details on genes differentially expressed in CD, CD+UC and UC compared to normal are shown in Tables 4, 5 and 6.

[0095] FIG. 16 depicts confirmation of selected up regulated genes by quantitative real-time RTPCR. The genes were randomly selected from Table 4-6 and include PSME2 (proteasome activator subunit 2), PSMB8 (proteasome subunit, beta type 8), ADM (adrenomedullin), STAT3 (signal transducer and activator of transcription 3), DMBT1 (deleted in malignant brain tumors 1) and CXCL1 (chemokine C-X-C-motif ligand 1). The relative expression value of a gene was normalized to that of GAPDH. Total RNA from six CD affected (CD-33, 49, 51, 53, 58 and 76), four UC affected (UC-32, 35, 38 and 55) and four controls (N65, N66, N69 and N79) were used to measure selected gene transcripts. The relative expression of a gene in each group was presented as a Box-Whiskers chart indicating the 25th and 75th percentiles of the data set with a box (a line through the box marks the 50th percentile). The data range (1 to 99 percentile) is shown by the whiskers and the black square represents the mean value for each group. *Statistical significance was determined with one-way unpaired Student's t test with p<0.05 considered statistically significant.

[0096] FIG. 17 depicts immunostaining of TAP1 (transporter 1, ATP-binding cassette, sub-family B) in colonic biopsies. TAP1 protein was detected using a polyclonal anti-human TAP1 antibody. Representative views are shown for colonoscopic biopsies taken from a healthy control (A) and two patients with CD (B and C). Positive reaction (brown) is seen in cytoplasm of mononuclear cells (arrows) and some epithelial cells (arrowhead).

[0097] FIG. 18 depicts differentially expressed genes in IBD unaffected and healthy control samples. SAM software was used to determine the gene expression patterns of CD and UC unaffected samples compared to normal controls. Relative gene expression is shown as above mean (red), mean (black) and below mean (green).

### DETAILED DESCRIPTION

[0098] The present invention provides biomarkers generated from comparison of protein profiles from subjects diagnosed with inflammatory bowel disease and from subjects without known neoplastic diseases, using the mass spectrometry techniques. In particular, the invention provides that these biomarkers, used individually, or preferably in combination with other biomarkers from this group or with other diagnostic tests, provide a novel method of determining inflammatory bowel disease status in a subject.

[0099] The present invention presents markers that are differentially present in samples of inflammatory bowel disease subjects and control subjects, and the application of this discovery in methods and kits for determining inflammatory bowel disease status. These protein markers are found in samples from inflammatory bowel disease subjects at levels that are different than the levels in samples from subject in whom human IBD is undetectable. Accordingly, the amount of one or more markers found in a test sample compared to a control, or the presence or absence of one or more markers in the test sample provides useful information regarding the inflammatory bowel disease status of the patient.

[0100] The present invention also relates to a method for identification of biomarkers for IBD, with high specificity and sensitivity. In particular, a panel of biomarkers were identified that are associated with inflammatory bowel disease status.

[0101] In the data presented herein, we describe for the first time a serum protein profile which aids in the diagnosis of inflammatory bowel disease. Examining 139 samples of subjects and healthy persons, this profile distinguished subjects with inflammatory bowel disease from control subjects independent validation sets.

### DEFINITIONS

[0102] Unless defined otherwise, all technical and scientific terms used herein have the meaning commonly understood by a person skilled in the art to which this invention belongs. The following references provide one of skill with a general definition of many of the terms used in this invention: Singleton et al., Dictionary of Microbiology and Molecular Biology (2nd ed. 1994); The Cambridge Dictionary of Science and Technology (Walker ed., 1988); The Glossary of Genetics, 5th Ed., R. Rieger et al. (eds.), Springer Verlag (1991); and Hale & Marham, The Harper Collins Dictionary of Biology (1991). As used herein, the following terms have the meanings ascribed to them unless specified otherwise.

[0103] “Inflammatory bowel disease,” as used herein, refers to a functional disorder of the colon (large intestine) that causes crampy abdominal pain, bloating, constipation and/or diarrhea. IBS is classified as a functional gastrointestinal disorder because no structural or biochemical cause can be found to explain the symptoms. The most common symptoms of IBD include, abdominal pain, weight loss, fever, rectal bleeding, skin and eye irritations, and diarrhea. Intervals of active disease, or ‘flares’, and periods of remission characterize IBD. Upon diagnostic testing, the colon shows no evidence of disease such as ulcers or inflammation. Therefore, IBS preferably diagnosed only after other possible digestive disorders and diseases have been ruled out. IBS is often misdiagnosed or misnamed as colitis, mucous colitis, spastic colon, irritable bowel disease or spastic bowel (colon).

[0104] “Ulcerative colitis,” as used herein refers to a disease that is a form of IBD and causes inflammation and sores, called ulcers, in the top layers of the lining of the large intestine. Common symptoms of UC include bloody diarrhea, fever and abdominal pain. There can also be symptoms outside the digestive system which are known as extra-intestinal symptoms. Fever is a characteristic of the inflammatory process that takes place in UC and there are several extra-intestinal symptoms that are not directly related to the inflammation in the colon and include eye inflammation, joint pains, skin rashes or lesions, and mouth ulcers. UC is diagnosed, for example, by stool culture, blood tests, fecal occult blood test, sigmoidoscopy, colonoscopy, and barium enema. There are several types of medications that are frequently used to treat UC, including, for example, sulfasalazine (Azulfadine), mesalamine (Asacol, Pentasa, Rowasa), osalazine (Dipentum), (Colazal) and corticosteroids (prednisone). Surgery may also be used to treat UC, usually after all available drug treatments have failed. Surgery for UC always involves a total colectomy, or a complete removal of the large intestine (colon). Resection, or removing only the diseased section of the colon, is not an option in UC, because the disease will only re-occur in the portion of the colon that is left.

[0105] “Crohn's disease,” as used herein refers to a form of IBD that is manifested by inflammation anywhere along the digestive tract from the mouth to the anus. Of CD cases, 45% occur in ileum and colon, 35% in just the ileum, and 20% in just the colon. Unlike ulcerative colitis (UC), which only affects the inner layer, CD commonly involves all layers of the intestinal wall. Common symptoms of CD include chronic diarrhea fever, abdominal pain, weight loss, and lack of appetite. Frequent diarrhea can lead to dehydration and nutritional deficiencies. Because the colon is inflamed, it is not as efficient at absorbing water and nutrients from food. Other symptoms include, fistulas and fissures. A fissure is a tear or ulcer in the lining of the anal canal and symptoms include painful bowel movements, bright red blood in toilet bowel or on paper, anal lump, and swollen skin tag. Acute fissures may be treated with Sitz baths, fiber to create softer stools, stool softeners, topical hydrocortisone, zinc oxide, petroleum jelly and topical anesthetics. A chronic fissure may need more aggressive treatment including surgery. A fistula is an abnormal tunnel connecting two body cavities or a body cavity to the skin. Approximately 30% of people with Crohn's Disease develop fistulas. Treatments include antibiotics, immunosuppressants, Remicade, liquid nutrition to replace solid food and surgery. Treatments for CD include, for example, sulfasalazine (Azulfadine), mesalamine (Asacol, Pentasa), balsalazide disodium (Colazal®), azathioprine (Imuran), 6-MP (Purinethol), cyclosporine, methotrexate, infliximab (Remicade), rifaximin, Budesonide (Entocort EC), and corticosteroids (prednisone). Surgery may also be used to treat CD, including resection, ileostomy, stoma, and strictureplasty, usually after all available drug treatments have failed. Anywhere from 40 to 60% of CD patients who have disease in the small bowel will have surgery in the first 10 years after diagnosis. Several different types of surgery are used to treat symptoms and complications of CD, yet none are a cure. Several tests may be used by physicians to diagnose CD, including, barium enema, upper GI series, stool culture, blood tests to determine a white blood cell count or if anemia is present, fecal occult blood test, sigmoidoscopy, colonoscopy, and other tests may be used to rule out other potential diagnoses.

[0106] The term “inflammatory bowel disease status” refers to the status of the disease in the patient. Examples of types of inflammatory bowel disease statuses include, but are not limited to, the subject's risk of IBD, including colorectal UC or CD, the presence or absence of disease (e.g., IBD, UC or CD), the stage of disease in a patient (e.g., IBD, UC or CD), and the effectiveness of treatment of disease. Other statuses and degrees of each status are known in the art.

[0107] “Gas phase ion spectrometer” refers to an apparatus that detects gas phase ions. Gas phase ion spectrometers include an ion source that supplies gas phase ions. Gas phase ion spectrometers include, for example, mass spectrometers, ion mobility spectrometers, and total ion current measuring devices. “Gas phase ion spectrometry” refers to the use of a gas phase ion spectrometer to detect gas phase ions.

[0108] “Mass spectrometer” refers to a gas phase ion spectrometer that measures a parameter that can be translated into mass-to-charge ratios of gas phase ions. Mass spectrometers generally include an ion source and a mass analyzer. Examples of mass spectrometers are time-of-flight, magnetic sector, quadrupole filter, ion trap, ion cyclotron resonance, electrostatic sector analyzer and hybrids of these. “Mass spectrometry” refers to the use of a mass spectrometer to detect gas phase ions.

[0109] “Laser desorption mass spectrometer” refers to a mass spectrometer that uses laser energy as a means to desorb, volatilize, and ionize an analyte.

[0110] “Tandem mass spectrometer” refers to any mass spectrometer that is capable of performing two successive stages of m/z-based discrimination or measurement of ions, including ions in an ion mixture. The phrase includes mass spectrometers having two mass analyzers that are capable of performing two successive stages of m/z-based discrimination or measurement of ions tandem-in-space. The phrase further includes mass spectrometers having a single mass analyzer that is capable of performing two successive stages of m/z-based discrimination or measurement of ions tandem-in-time. The phrase thus explicitly includes Qq-TOF mass spectrometers, ion trap mass spectrometers, ion trap-TOF mass spectrometers, TOF-TOF mass spectrometers, Fourier transform ion cyclotron resonance mass spectrometers, electrostatic sector—magnetic sector mass spectrometers, and combinations thereof.

[0111] “Mass analyzer” refers to a sub-assembly of a mass spectrometer that comprises means for measuring a parameter that can be translated into mass-to-charge ratios of gas phase ions. In a time-of-flight mass spectrometer the mass analyzer comprises an ion optic assembly, a flight tube and an ion detector.

[0112] “Ion source” refers to a sub-assembly of a gas phase ion spectrometer that provides gas phase ions. In one embodiment, the ion source provides ions through a desorption/ionization process. Such embodiments generally comprise a probe interface that positionally engages a probe in an interrogatable relationship to a source of ionizing energy (e.g., a laser desorption/ionization source) and in concurrent communication at atmospheric or subatmospheric pressure with a detector of a gas phase ion spectrometer.

[0113] Forms of ionizing energy for desorbing/ionizing an analyte from a solid phase include, for example: (1) laser energy; (2) fast atoms (used in fast atom bombardment); (3) high energy particles generated via beta decay of radionucleides (used in plasma desorption); and (4) primary ions generating secondary ions (used in secondary ion mass spectrometry). The preferred form of ionizing energy for solid phase analytes is a laser (used in laser desorption/ionization), in particular, nitrogen lasers, Nd-Yag lasers and other pulsed laser sources. “Fluence” refers to the energy delivered per unit area of interrogated image. A high fluence source, such as a laser, will deliver about 1 mJ/mm2 to 50 mJ/mm2. Typically, a sample is placed on the surface of a probe, the probe is engaged with the probe interface and the probe surface is struck with the ionizing energy. The energy desorbs analyte molecules from the surface into the gas phase and ionizes them.

[0114] Other forms of ionizing energy for analytes include, for example: (1) electrons that ionize gas phase neutrals; (2) strong electric field to induce ionization from gas phase, solid phase, or liquid phase neutrals; and (3) a source that applies a combination of ionization particles or electric fields with neutral chemicals to induce chemical ionization of solid phase, gas phase, and liquid phase neutrals.

[0115] “Solid support” refers to a solid material which can be derivatized with, or otherwise attached to, a capture reagent. Exemplary solid supports include probes, microtiter plates and chromatographic resins.

[0116] “Probe” in the context of this invention refers to a device adapted to engage a probe interface of a gas phase ion spectrometer (e.g., a mass spectrometer) and to present an analyte to ionizing energy for ionization and introduction into a gas phase ion spectrometer, such as a mass spectrometer. A “probe” will generally comprise a solid substrate (either flexible or rigid) comprising a sample presenting surface on which an analyte is presented to the source of ionizing energy.

[0117] “Surface-enhanced laser desorption/ionization” or “SELDI” refers to a method of desorption/ionization gas phase ion spectrometry (e.g., mass spectrometry) in which the analyte is captured on the surface of a SELDI probe that engages the probe interface of the gas phase ion spectrometer. In “SELDI MS,” the gas phase ion spectrometer is a mass spectrometer. SELDI technology is described in, e.g., U.S. Pat. No. 5,719,060 (Hutchens and Yip) and U.S. Pat. No. 6,225,047 (Hutchens and Yip).

[0118] “Surface-Enhanced Affinity Capture” or “SEAC” is a version of SELDI that involves the use of probes comprising an absorbent surface (a “SEAC probe”). “Adsorbent surface” refers to a surface to which is bound an adsorbent (also called a “capture reagent” or an “affinity reagent”). An adsorbent is any material capable of binding an analyte (e.g., a target polypeptide or nucleic acid). “Chromatographic adsorbent” refers to a material typically used in chromatography. Chromatographic adsorbents include, for example, ion exchange materials, metal chelators (e.g., nitriloacetic acid or iminodiacetic acid), immobilized metal chelates, hydrophobic interaction adsorbents, hydrophilic interaction adsorbents, dyes, simple biomolecules (e.g., nucleotides, amino acids, simple sugars and fatty acids) and mixed mode adsorbents (e.g., hydrophobic attraction/electrostatic repulsion adsorbents). “Biospecific adsorbent” refers an adsorbent comprising a biomolecule, e.g., a nucleic acid molecule (e.g., an aptamer), a polypeptide, a polysaccharide, a lipid, a steroid or a conjugate of these (e.g., a glycoprotein, a lipoprotein, a glycolipid, a nucleic acid (e.g., DNA)-protein conjugate). In certain instances the biospecific adsorbent can be a macromolecular structure such as a multiprotein complex, a biological membrane or a virus. Examples of biospecific adsorbents are antibodies, receptor proteins and nucleic acids. Biospecific adsorbents typically have higher specificity for a target analyte than chromatographic adsorbents. Further examples of adsorbents for use in SELDI can be found in U.S. Pat. No. 6,225,047 (Hutchens and Yip, “Use of retentate chromatography to generate difference maps,” May 1, 2001).

[0119] In some embodiments, a SEAC probe is provided as a pre-activated surface which can be modified to provide an adsorbent of choice. For example, certain probes are provided with a reactive moiety that is capable of binding a biological molecule through a covalent bond. Epoxide and carbodiimidizole are useful reactive moieties to covalently bind biospecific adsorbents such as antibodies or cellular receptors.

[0120] “Adsorption” refers to detectable non-covalent binding of an analyte to an adsorbent or capture reagent.

[0121] “Surface-Enhanced Neat Desorption” or “SEND” is a version of SELDI that involves the use of probes comprising energy absorbing molecules chemically bound to the probe surface. (“SEND probe.”) “Energy absorbing molecules” (“EAM”) refer to molecules that are capable of absorbing energy from a laser desorption/ionization source and thereafter contributing to desorption and ionization of analyte molecules in contact therewith. The phrase includes molecules used in MALDI, frequently referred to as “matrix”, and explicitly includes cinnamic acid derivatives, sinapinic acid (“SPA”), cyano-hydroxy-cinnamic acid (“CHCA”) and dihydroxybenzoic acid, ferulic acid, hydroxyacetophenone derivatives, as well as others. It also includes EAMs used in SELDI. SEND is further described in U.S. Pat. No. 5,719,060 and U.S. patent application 60/408,255, filed Sep. 4, 2002 (Kitagawa, “Monomers And Polymers Having Energy Absorbing Moieties Of Use In Desorption/Ionization Of Analytes”).

[0122] “Surface-Enhanced Photolabile Attachment and Release” or “SEPAR” is a version of SELDI that involves the use of probes having moieties attached to the surface that can covalently bind an analyte, and then release the analyte through breaking a photolabile bond in the moiety after exposure to light, e.g., laser light. SEPAR is further described in U.S. Pat. No. 5,719,060.

[0123] “Eluant” or “wash solution” refers to an agent, typically a solution, which is used to affect or modify adsorption of an analyte to an adsorbent surface and/or remove unbound materials from the surface. The elution characteristics of an eluant can depend on, for example, pH, ionic strength, hydrophobicity, degree of chaotropism, detergent strength and temperature.

[0124] “Analyte” refers to any component of a sample that is desired to be detected. The term can refer to a single component or a plurality of components in the sample.

[0125] The “complexity” of a sample adsorbed to an adsorption surface of an affinity capture probe means the number of different protein species that are adsorbed.

[0126] “Molecular binding partners” and “specific binding partners” refer to pairs of molecules, typically pairs of biomolecules that exhibit specific binding. Molecular binding partners include, without limitation, receptor and ligand, antibody and antigen, biotin and avidin, and biotin and streptavidin.

[0127] “Monitoring” refers to recording changes in a continuously varying parameter.

[0128] “Biochip” refers to a solid substrate having a generally planar surface to which an adsorbent is attached. Frequently, the surface of the biochip comprises a plurality of addressable locations, each of which location has the adsorbent bound there. Biochips can be adapted to engage a probe interface, and therefore, function as probes.

[0129] “Protein biochip” refers to a biochip adapted for the capture of polypeptides. Many protein biochips are described in the art. These include, for example, protein biochips produced by Ciphergen Biosystems (Fremont, Calif.), Packard BioScience Company (Meriden Conn.), Zyomyx (Hayward, Calif.) and Phylos (Lexington, Mass.). Examples of such protein biochips are described in the following patents or patent applications: U.S. Pat. No. 6,225,047 (Hutchens and Yip, “Use of retentate chromatography to generate difference maps,” May 1, 2001); International publication WO 99/51773 (Kuimelis and Wagner, “Addressable protein arrays,” Oct. 14, 1999); U.S. Pat. No. 6,329,209 (Wagner et al., “Arrays of protein-capture agents and methods of use thereof,” Dec. 11, 2001) and International publication WO 00/56934 (Englert et al., “Continuous porous matrix arrays,” Sep. 28, 2000). Protein biochips produced by Ciphergen Biosystems comprise surfaces having chromatographic or biospecific adsorbents attached thereto at addressable locations. Biochips are further described in: WO 00/66265 (Rich et al., “Probes for a Gas Phase Ion Spectrometer,” Nov. 9, 2000); WO 00/67293 (Beecher et al., “Sample Holder with Hydrophobic Coating for Gas Phase Mass Spectrometer,” Nov. 9, 2000); U.S. patent application US20030032043A1 (Pohl and Papanu, “Latex Based Adsorbent Chip,” Jul. 16, 2002) and U.S. patent application 60/350,110 (Um et al., “Hydrophobic Surface Chip,” Nov. 8, 2001).

[0130] Upon capture on a biochip, analytes can be detected by a variety of detection methods selected from, for example, a gas phase ion spectrometry method, an optical method, an electrochemical method, atomic force microscopy and a radio frequency method. Gas phase ion spectrometry methods are described herein. Of particular interest is the use of mass spectrometry, and in particular, SELDI. Optical methods include, for example, detection of fluorescence, luminescence, chemiluminescence, absorbance, reflectance, transmittance, birefringence or refractive index (e.g., surface plasmon resonance, ellipsometry, a resonant mirror method, a grating coupler waveguide method or interferometry). Optical methods include microscopy (both confocal and non-confocal), imaging methods and non-imaging methods. Immunoassays in various formats (e.g., ELISA) are popular methods for detection of analytes captured on a solid phase. Electrochemical methods include voltametry and amperometry methods. Radio frequency methods include multipolar resonance spectroscopy.

[0131] “Marker” or “biomarker” in the context of the present invention refer to a polypeptide (of a particular apparent molecular weight) or nucleic acid, which is differentially present in a sample taken from subjects having human inflammatory bowel disease as compared to a comparable sample taken from control subjects (e.g., a person with a negative diagnosis or undetectable inflammatory bowel disease, normal or healthy subject). The term “biomarker” is used interchangeably with the term “marker.” The biomarkers are identified by molecular mass in Daltons, and include the masses centered around the identified molecular masses for each marker.

[0132] The term “measuring” means methods which include detecting the presence or absence of marker(s) in the sample, quantifying the amount of marker(s) in the sample, and/or qualifying the type of biomarker. Measuring can be accomplished by methods known in the art and those further described herein, including but not limited to microarray analysis (with Significance Analysis of Microarrays (SAM) software), SELDI and immunoassay. Any suitable methods can be used to detect and measure one or more of the markers described herein. These methods include, without limitation, mass spectrometry (e.g., laser desorption/ionization mass spectrometry), fluorescence (e.g. sandwich immunoassay), surface plasmon resonance, ellipsometry and atomic force microscopy.

[0133] “Detect” refers to identifying the presence, absence or amount of the object to be detected.

[0134] The phrase “differentially present” refers to differences in the quantity and/or the frequency of a marker present in a sample taken from subjects having human IBD as compared to a control subject. For example, some markers described herein are present at an elevated level in samples of subjects compared to samples from control subjects. In contrast, other markers described herein are present at a decreased level in samples of inflammatory bowel disease subjects compared to samples from control subjects. Furthermore, a marker can be a polypeptide, which is detected at a higher frequency or at a lower frequency in samples of human IBD subjects compared to samples of control subjects.

[0135] Furthermore, a marker can be a polypeptide, which is detected at a higher frequency or at a lower frequency in samples of unaffected tissue from human IBD subjects compared to samples affected tissue from human IBD subjects.

[0136] Furthermore, a marker can be a polypeptide, which is detected at a higher frequency or at a lower frequency in samples of human unaffected tissue from IBD subjects compared to samples of control subjects.

[0137] Furthermore, a marker can be a polypeptide, which is detected at a higher frequency or at a lower frequency in samples of human affected tissue from IBD subjects compared to samples of control subjects.

[0138] A marker can be differentially present in terms of quantity, frequency or both.

[0139] “Affected tissue,” as used herein refers to tissue from and IBD subject that is grossly diseased tissue (tissue that is inflamed or shows fibrosis.

[0140] “Unaffected tissue,” as used herein refers to a tissue from an IBD subject that is from a portion of tissue that does not have gross disease present, for example tissue that is about 1, 2, 5, 10, 20 or more cm from grossly diseased tissue.

[0141] A polypeptide is differentially present between two samples if the amount of the polypeptide in one sample is statistically significantly different from the amount of the polypeptide in the other sample. For example, a polypeptide is differentially present between the two samples if it is present at least about 120%, at least about 130%, at least about 150%, at least about 180%, at least about 200%, at least about 300%, at least about 500%, at least about 700%, at least about 900%, or at least about 1000% greater than it is present in the other sample, or if it is detectable in one sample and not detectable in the other.

[0142] Alternatively or additionally, a polypeptide is differentially present between two sets of samples if the frequency of detecting the polypeptide in the IBD subjects' samples is statistically significantly higher or lower than in the control samples. For example, a polypeptide is differentially present between the two sets of samples if it is detected at least about 120%, at least about 130%, at least about 150%, at least about 180%, at least about 200%, at least about 300%, at least about 500%, at least about 700%, at least about 900%, or at least about 1000% more frequently or less frequently observed in one set of samples than the other set of samples.

[0143] “Diagnostic” means identifying the presence or nature of a pathologic condition, i.e., inflammatory bowel disease. Diagnostic methods differ in their sensitivity and specificity. The “sensitivity” of a diagnostic assay is the percentage of diseased individuals who test positive (percent of “true positives”). Diseased individuals not detected by the assay are “false negatives.” Subjects who are not diseased and who test negative in the assay, are termed “true negatives.” The “specificity” of a diagnostic assay is 1 minus the false positive rate, where the “false positive” rate is defined as the proportion of those without the disease who test positive. While a particular diagnostic method may not provide a definitive diagnosis of a condition, it suffices if the method provides a positive indication that aids in diagnosis.

[0144] A “test amount” of a marker refers to an amount of a marker present in a sample being tested. A test amount can be either in absolute amount (e.g., μg/ml) or a relative amount (e.g., relative intensity of signals).

[0145] A “diagnostic amount” of a marker refers to an amount of a marker in a subject's sample that is consistent with a diagnosis of inflammatory bowel disease. A diagnostic amount can be either in absolute amount (e.g., μg/ml) or a relative amount (e.g., relative intensity of signals).

[0146] A “control amount” of a marker can be any amount or a range of amount, which is to be compared against a test amount of a marker. For example, a control amount of a marker can be the amount of a marker in a person without inflammatory bowel disease. A control amount can be either in absolute amount (e.g., μg/ml) or a relative amount (e.g., relative intensity of signals).

[0147] As used herein, the term “sensitivity” is the percentage of subjects with a particular disease. For example, in the inflammatory bowel disease group, the biomarkers of the invention have a sensitivity of about 80.0%-98.6%, and preferably a sensitivity of 85%, 87.5%, 90%, 92.5%, 95%, 97%, 98%, 99% or approaching 100%.

[0148] As used herein, the term “specificity” is the percentage of subjects correctly identified as having a particular disease i.e., normal or healthy subjects. For example, the specificity is calculated as the number of subjects with a particular disease as compared to non-IBD subjects (e.g., normal healthy subjects). The specificity of the assays described herein may range from about 80% to 100%. Preferably the specificity is about 90%, 95%, or 100%.

[0149] The terms “polypeptide,” “peptide” and “protein” are used interchangeably herein to refer to a polymer of amino acid residues. The terms apply to amino acid polymers in which one or more amino acid residue is an analog or mimetic of a corresponding naturally occurring amino acid, as well as to naturally occurring amino acid polymers. Polypeptides can be modified, e.g., by the addition of carbohydrate residues to form glycoproteins. The terms “polypeptide,” “peptide” and “protein” include glycoproteins, as well as non-glycoproteins.

[0150] “Immunoassay” is an assay that uses an antibody to specifically bind an antigen (e.g., a marker). The immunoassay is characterized by the use of specific binding properties of a particular antibody to isolate, target, and/or quantify the antigen.

[0151] “Antibody” refers to a polypeptide ligand substantially encoded by an immunoglobulin gene or immunoglobulin genes, or fragments thereof, which specifically binds and recognizes an epitope (e.g., an antigen). The recognized immunoglobulin genes include the kappa and lambda light chain constant region genes, the alpha, gamma, delta, epsilon and mu heavy chain constant region genes, and the myriad immunoglobulin variable region genes. Antibodies exist, e.g., as intact immunoglobulins or as a number of well-characterized fragments produced by digestion with various peptidases. This includes, e.g., Fab′ and F(ab)′₂ fragments. The term “antibody,” as used herein, also includes antibody fragments either produced by the modification of whole antibodies or those synthesized de novo using recombinant DNA methodologies. It also includes polyclonal antibodies, monoclonal antibodies, chimeric antibodies, humanized antibodies, or single chain antibodies. “Fc” portion of an antibody refers to that portion of an immunoglobulin heavy chain that comprises one or more heavy chain constant region domains, CH₁, CH₂ and CH₃, but does not include the heavy chain variable region.

[0152] The phrase “specifically (or selectively) binds” to an antibody or “specifically (or selectively) immunoreactive with,” when referring to a protein or peptide, refers to a binding reaction that is determinative of the presence of the protein in a heterogeneous population of proteins and other biologics. Thus, under designated immunoassay conditions, the specified antibodies bind to a particular protein at least two times the background and do not substantially bind in a significant amount to other proteins present in the sample. Specific binding to an antibody under such conditions may require an antibody that is selected for its specificity for a particular protein. For example, polyclonal antibodies raised to marker “X” from specific species such as rat, mouse, or human can be selected to obtain only those polyclonal antibodies that are specifically immunoreactive with marker “X” and not with other proteins, except for polymorphic variants and alleles of marker “X”. This selection may be achieved by subtracting out antibodies that cross-react with marker “X” molecules from other species. A variety of immunoassay formats may be used to select antibodies specifically immunoreactive with a particular protein. For example, solid-phase ELISA immunoassays are routinely used to select antibodies specifically immunoreactive with a protein (see, e.g., Harlow & Lane, Antibodies, A Laboratory Manual (1988), for a description of immunoassay formats and conditions that can be used to determine specific immunoreactivity). Typically a specific or selective reaction will be at least twice background signal or noise and more typically more than 10 to 100 times background.

[0153] “Managing subject treatment” refers to the behavior of the clinician or physician subsequent to the determination of IBD status. For example, if the result of the methods of the present invention is inconclusive or there is reason that confirmation of status is necessary, the physician may order more tests. Alternatively, if the status indicates that treatment is appropriate, the physician may schedule the patient for treatment, e.g., surgery, administer one or more therapeutic agents or radiation. Likewise, if the status is negative, e.g., late stage inflammatory bowel disease or if the status is acute, no further action may be warranted. Furthermore, if the results show that treatment has been successful, a maintenance therapy or no further management may be necessary.

### Description of the Biomarkers

[0154] Crohn's Disease Biomarkers

[0155] CD biomarkers include the proteins or their encoding nucleic acids for the following pathways or cellular processes: acute phase and innate immune response (IL-1 and TNFα mediated induction of NF-κB), immune response, apoptosis, inflammatory cell recruitment pathways, inflammatory response (IL1B, S100A8), antigen presentation (MHC class II immunoproteasome members PSME2 and PSMB8, MHC class II ATP-binding antigen peptide transporter TAP1, HLA-DMA and UBD of MHC class I), inflammatory cell chemotaxis (IL8, CXCL1, CXCL3), apoptosis (CASP1, CASP10), macrophage activation (ASMT and interferon-regulated genes IFITM1, IFITM3, ISG20, IFI35, SP110), leukocyte protection (LILRB encoding a receptor for class I MHC antigens), recruitment of inflammatory cells, acute phase response (ADM, STAT1, STAT3, and protease inhibitors SERPINA1 and SPINK1 to prevent tissue destruction), and chemokine and interferon-γ responsive genes.

[0156] Crohn's disease patients often require surgery due to obstruction, when disease may be well established and gene expression patterns rather static. Profiling of endoscopic biopsies provide the opportunity to interrogate all stages of disease. Secondly, since only a fraction of IBD patients require surgery, large numbers of IBD cases remain unexplored. Clinical sub grouping of CD is based on anatomic site of involvement (ileum only, colon only, or upper small bowel and colon)¹² and disease behavior (inflammatory, stricturing, or fistulizing).^{13, 14}

[0157] Pinch biopsies are collected during endoscopy for routine evaluation of disease activity by histology¹⁵ To further develop the methods of the invention, single endoscopic pinch biopsies were used from nine colonic Crohn's disease cases with mild to severe inflammation, five ulcerative colitis cases and four healthy controls. For each IBD case, expression patterns for a biopsy from an affected and one from an unaffected area (as judged during endoscopy) were obtained. Multidimensional scaling of the expression patterns distinguished IBD from healthy individuals, CD from UC, and also unaffected from healthy controls. Although, Crohn's colitis harbors some phenotypic overlaps with ulcerative colitis, the expression profiles identify a distinct set of differentially expressed genes, and distinct pathophysiologies, for each disease.

### UC Biomarkers

[0158] UC biomarkers include the proteins or their encoding nucleic acids for the following pathways or cellular processes: endoplasmic reticulum stress pathway members, protein-trafficking pathway members, and detoxification and cell growth pathway members.

[0159] Further UC biomarkers include the proteins or their encoding nucleic acids for the following pathways or cellular processes: up-regulations of complement cascade activation (BF and C4A), growth regulatory (MIA) and apoptosis (ATM) pathways, detoxification (NNMT) and intracellular transport (SNX26) pathways; and down regulations of biosynthetic and metabolic processes (PANK3, HPGD), and endoplasmic reticulum-, Golgi-transport/intracellular trafficking (F2RL1, GABRG3, GNGT1, SLC4A4).

[0160] Thirteen genes are over expressed in UC primarily and the two UC-like CD cases 33 and 53, roughly distinguishing UC from CD (FIG. 3).

[0161] Resection of tissued shows different gene expression patterns than does biopsy of tissue. For example, UC patterns are quite dynamic showing multiple gene expression changes (REG1A, LCN2, NOS2, NNMT, for example).

[0162] Gene expression changes in UC, on the other hand, make a strong case for loss of epithelial homeostasis as being central to UC.

[0163] IBD Biomarkers

[0164] IBD biomarkers include both the UC and CD biomarkers (see Tables 1-9) as well as the following genes and nucleic acids and proteins encoded by the following genes, as well as fragments and variants thereof: CASP10 at 2q33-34, HLA-DMA, TAP1, UBD, PSMB8 at 6p21.3, and PSME2 at 14q11.2. The sequences of these biomarkers are appended to the specification, as well as exemplary primers for amplifying the biomarkers.

[0165] Nine genes are elevated in most CD and UC affected profiles and most likely contribute towards separation of IBD from normal controls in the MDS plot. These genes include several chemokine ligands produced by activated monocytes and neutrophils, indicative of an immune/inflammation process and seem to correlate well with the inflammation scoring of the samples by histology (e.g., Group 3)

[0166] Certain overlaps evident between the CD and the UC over expressed gene signatures (Table 2. lower panel), involve immune response, antigen presentation (IGHG4, GIP3, LCN2), complement function (C4BPB, DAF), antimicrobial (DEFA6) and general inflammatory response (NOS2A, S100A9, REG1A, PAP).

[0167] Further biomarkers for IBD include the proteins or their encoding nucleic acids for the following pathways or cellular processes: apoptosis-regulation (CASP10, LILRB, 1 GNGT1 (7q21.3)), antigen-presenting genes (PSME2), immunoproteasome for generating MHC class I binding antigenic peptides (IBD3, HLA-DMA, TAP1, UBD and PSMB8), and Wnt-signaling (PRKACB (1p36.1, IBD7)).

[0168] Corresponding proteins or fragments of proteins for these biomarkers may be represented as intensity peaks in SELDI (surface enhanced laser desorption/ionization) protein chip/mass spectra with molecular masses centered around the values. As discussed above, Markers 1-97, 99-211, 213-264, 266-401 also may be characterized based on affinity for an adsorbent, particularly binding to a cation-exchange or hydrophobic surface under the conditions specified in the Examples, which follow.

[0169] The above-identified biomarkers, are examples of biomarkers, as determined by identity, identified by the methods of the invention and serve merely as an illustrative example and are not meant to limit the invention in any way.

[0170] A major advantage of identification of these markers is their high specificity and ability to differentiate between different inflammatory bowel disease states (e.g., between UC and CD).

[0171] More specifically, the present invention is based upon the discovery of protein markers that are differentially present in samples of human inflammatory bowel disease subjects and control subjects, and the application of this discovery in methods and kits for aiding a human inflammatory bowel disease diagnosis. Some of these protein markers are found at an elevated level and/or more frequently in samples from human inflammatory bowel disease subjects compared to a control (e.g., subjects with diseases other than inflammatory bowel disease). Accordingly, the amount of one or more markers found in a test sample compared to a control, or the mere detection of one or more markers in the test sample provides useful information regarding probability of whether a subject being tested has inflammatory bowel disease or not, and/or whether a subject being tested has a particular inflammatory bowel disease subtype or not.

[0172] The protein of the present invention have a number of other uses. For example, the markers can be used to screen for compounds that modulate the expression of the markers in vitro or in vivo, which compounds in turn may be useful in treating or preventing human inflammatory bowel disease in subjects. In another example, markers can be used to monitor responses to certain treatments of human inflammatory bowel disease. In yet another example, the markers can be used in heredity studies. For instance, certain markers may be genetically linked. This can be determined by, e.g., analyzing samples from a population of human inflammatory bowel disease subjects whose families have a history of inflammatory bowel disease. The results can then be compared with data obtained from, e.g., inflammatory bowel disease subjects whose families do not have a history of inflammatory bowel disease. The markers that are genetically linked may be used as a tool to determine if a subject whose family has a history of inflammatory bowel disease is pre-disposed to having inflammatory bowel disease.

[0173] In another aspect, the invention provides methods for detecting markers which are differentially present in the samples of an inflammatory bowel disease patient and a control (e.g., subjects in non-inflammatory bowel disease subjects). The markers can be detected in a number of biological samples. The sample is preferably a biological biopsy sample.

[0174] Any suitable methods can be used to detect one or more of the markers described herein. These methods include, without limitation, mass spectrometry (e.g., laser desorption/ionization mass spectrometry), fluorescence (e.g. sandwich immunoassay), surface plasmon resonance, ellipsometry and atomic force microscopy. Methods may further include, by one or more of microarrays, PCR methods, electrospray ionization mass spectrometry (ESI-MS), ESI-MS/MS, ESI-MS/(MS)ⁿ, matrix-assisted laser desorption ionization time-of-flight mass spectrometry (MALDI-TOF-MS), surface-enhanced laser desorption/ionization time-of-flight mass spectrometry (SELDI-TOF-MS), desorption/ionization on silicon (DIOS), secondary ion mass spectrometry (SIMS), quadrupole time-of-flight (Q-TOF), atmospheric pressure chemical ionization mass spectrometry (APCI-MS), APCI-MS/MS, APCI-(MS)ⁿ, atmospheric pressure photoionization mass spectrometry (APPI-MS), APPI-MS/MS, and APPI-(MS).sub.n, quadrupole mass spectrometry, fourier transform mass spectrometry (FTMS), and ion trap mass spectrometry, where n is an integer greater than zero.

[0175] The following example is illustrative of the methods used to identify biomarkers for detection of inflammatory bowel disease. It is not meant to limit or construe the invention in any way. A sample, such as for example, serum from a subject or patient, is immobilized on a biochip. Preferably, the biochip comprises a functionalized, cross-linked polymer in the form of a hydrogel physically attached to the surface of the biochip or covalently attached through a silane to the surface of the biochip. However, any biochip which can bind samples from subjects can be used. The surfaces of the biochips are comprised of, for example, hydrophilic adsorbent to capture hydrophilic proteins (e.g. silicon oxide); carboimidizole functional groups that can react with groups on proteins for covalent binding; epoxide functional groups for covalent binding with proteins (e.g. antibodies, receptors, lectins, heparin, Protein A, biotin/streptavidin and the like); anionic exchange groups; cation exchange groups; metal chelators and the like.

[0176] Preferably, samples are pre-fractionated prior to immobilization as discussed below. Analytes or samples captured on the surface of a biochip can be detected by any method known in the art. This includes, for example, mass spectrometry, fluorescence, surface plasmon resonance, ellipsometry and atomic force microscopy. Mass spectrometry, and particularly SELDI mass spectrometry, is a particularly useful method for detection of the biomarkers of this invention. Other methods include, chemical extraction partitioning, ion exchange chromatography, reverse phase liquid chromatography, isoelectric focusing, one-dimensional polyacrylamide gel electrophoresis (PAGE), two-dimensional polyacrylamide gel electrophoresis (2D-PAGE), thin-layer chromatography, gas chromatography, liquid chromatography, and any combination thereof.

[0177] Immobilized samples or analytes are preferably subjected to laser ionization and the intensity of signal for mass/charge ratio is detected. The data obtained from the mass/charge ratio signal is transformed into data which is read by any type of computer. An algorithm is executed by the computer user that classifies the data according to user input parameters for detecting signals that represent biomarkers present in, for example, inflammatory bowel disease subjects and are lacking in non-inflammatory bowel disease subject controls. The biomarkers are most preferably identified by their molecular weights.

### Test Samples

[0178] Subject Types

[0179] Samples are collected from subjects to establish inflammatory bowel disease status. The subjects may be subjects who have been determined to have a high risk of inflammatory bowel disease based on their family history, a previous treatment, subjects with physical symptoms known to be associated with inflammatory bowel disease, subjects identified through screening assays (e.g., sigmoidoscopy) or rectal digital exam or rigid or flexible colonoscopy or CT scan or other x-ray techniques. Other subjects include subjects who have inflammatory bowel disease and the test is being used to determine the effectiveness of therapy or treatment they are receiving. Also, subjects could include healthy people who are having a test as part of a routine examination, or to establish baseline levels of the biomarkers. Samples may be collected from subjects who had been diagnosed with inflammatory bowel disease and received treatment to eliminate the inflammatory bowel disease, or perhaps are in remission.

[0180] Types of Sample and Preparation of the Sample

[0181] The markers can be measured in different types of biological samples. The sample is preferably a biological tissue or fluid sample. Examples of biological tissue sample is a colon or intestinal biopsy sample, from for example a endoscopic examination. Examples of a biological fluid sample useful in this invention include blood, blood serum, plasma, vaginal secretions, urine, tears, saliva, urine, tissue, cells, organs, seminal fluids, bone marrow, cerebrospinal fluid, etc. Because the markers are found in intestinal and/or colon tissue, these are preferred sample sources for embodiments of the invention.

[0182] Nucleic acids may be obtained from the samples in many ways known to one of skill in the art. For example, extraction methods, including for example, solvent extraction, affinity purification and centrifugation. Selective precipitation can also purify nucleic acids. Chromatography methods may also be utilized including, gel filtration, ion exchange, selective adsorption, or affinity binding. The nucleic acids may be, for example, RNA, DNA or may be synthesized into cDNA. The nucleic acids may be detected using microarray techniques that are well known in the art, for example, Affymetrix arrays followed by multi-dimensional scaling techniques. See R. Ekins and F. W. Chu, Microarrays: their origins and applications. Trends in Biotechnology, 1999, 17, 217-218; D. D. Shoemaker, et al., Experimental annotation of the human genome using microarray technology, Nature Volume 409 Number 6822 Page 922-927 (2001) and U.S. Pat. No. 5,750,015.

[0183] The markers can be resolved in a sample by using a variety of techniques, e.g., nucleic acid chips, PCR, real time PCR, reverse transcriptase PCR, real time reverse transcriptase PCR, in situ PCR, chromatographic separation coupled with mass spectrometry, protein capture using immobilized antibodies or by traditional immunoassays.

[0184] Biomarker expression may also be by PCR methods, including for example, real time PCR. See for example, U.S. Pat. Nos. 5,723,591; 5,801,155 and 6,084,102 and Higuchi, 1992 and 1993. PCR assays may be done, for example, in a multi-well plate formats or in chips, such as the BioTrove OpenArray™ Chips (BioTrove, Woburn, Mass.).

[0185] If desired, the sample can be prepared to enhance detectability of the markers. For example, to increase the detectability of markers, a blood serum sample from the subject can be preferably fractionated by, e.g., Cibacron blue agarose chromatography and single stranded DNA affinity chromatography, anion exchange chromatography, affinity chromatography (e.g., with antibodies) and the like. The method of fractionation depends on the type of detection method used. Any method that enriches for the protein of interest can be used. Typically, preparation involves fractionation of the sample and collection of fractions determined to contain the biomarkers. Methods of pre-fractionation include, for example, size exclusion chromatography, ion exchange chromatography, heparin chromatography, affinity chromatography, sequential extraction, gel electrophoresis and liquid chromatography. The analytes also may be modified prior to detection. These methods are useful to simplify the sample for further analysis. For example, it can be useful to remove high abundance proteins, such as albumin, from blood before analysis.

[0186] In one embodiment, a sample can be pre-fractionated according to size of proteins in a sample using size exclusion chromatography. For a biological sample wherein the amount of sample available is small, preferably a size selection spin column is used. For example, a K30 spin column (available from Princeton Separation, Ciphergen Biosystems, Inc., etc.) can be used. In general, the first fraction that is eluted from the column (“fraction 1”) has the highest percentage of high molecular weight proteins; fraction 2 has a lower percentage of high molecular weight proteins; fraction 3 has even a lower percentage of high molecular weight proteins; fraction 4 has the lowest amount of large proteins; and so on. Each fraction can then be analyzed by gas phase ion spectrometry for the detection of markers.

[0187] In another embodiment, a sample can be pre-fractionated by anion exchange chromatography. Anion exchange chromatography allows pre-fractionation of the proteins in a sample roughly according to their charge characteristics. For example, a Q anion-exchange resin can be used (e.g., Q HyperD F, Biosepra), and a sample can be sequentially eluted with eluants having different pH's. Anion exchange chromatography allows separation of biomolecules in a sample that are more negatively charged from other types of biomolecules. Proteins that are eluted with an eluant having a high pH is likely to be weakly negatively charged, and a fraction that is eluted with an eluant having a low pH is likely to be strongly negatively charged. Thus, in addition to reducing complexity of a sample, anion exchange chromatography separates proteins according to their binding characteristics.

[0188] In yet another embodiment, a sample can be pre-fractionated by heparin chromatography. Heparin chromatography allows pre-fractionation of the markers in a sample also on the basis of affinity interaction with heparin and charge characteristics. Heparin, a sulfated mucopolysaccharide, will bind markers with positively charged moieties and a sample can be sequentially eluted with eluants having different pH's or salt concentrations. Markers eluted with an eluant having a low pH are more likely to be weakly positively charged. Markers eluted with an eluant having a high pH are more likely to be strongly positively charged. Thus, heparin chromatography also reduces the complexity of a sample and separates markers according to their binding characteristics.

[0189] In yet another embodiment, a sample can be pre-fractionated by removing proteins that are present in a high quantity or that may interfere with the detection of markers in a sample. For example, in a blood serum sample, serum albumin is present in a high quantity and may obscure the analysis of markers. Thus, a blood serum sample can be pre-fractionated by removing serum albumin. Serum albumin can be removed using a substrate that comprises adsorbents that specifically bind serum albumin. For example, a column which comprises, e.g., Cibacron blue agarose (which has a high affinity for serum albumin) or anti-serum albumin antibodies can be used.

[0190] In yet another embodiment, a sample can be pre-fractionated by isolating proteins that have a specific characteristic, e.g. are glycosylated. For example, a blood serum sample can be fractionated by passing the sample over a lectin chromatography column (which has a high affinity for sugars). Glycosylated proteins will bind to the lectin column and non-glycosylated proteins will pass through the flow through. Glycosylated proteins are then eluted from the lectin column with an eluant containing a sugar, e.g., N-acetyl-glucosamine and are available for further analysis.

[0191] Many types of affinity adsorbents exist which are suitable for pre-fractionating blood serum samples. An example of one other type of affinity chromatography available to pre-fractionate a sample is a single stranded DNA spin column. These columns bind proteins which are basic or positively charged. Bound proteins are then eluted from the column using eluants containing denaturants or high pH.

[0192] Thus there are many ways to reduce the complexity of a sample based on the binding properties of the proteins in the sample, or the characteristics of the proteins in the sample.

[0193] In yet another embodiment, a sample can be fractionated using a sequential extraction protocol. In sequential extraction, a sample is exposed to a series of adsorbents to extract different types of biomolecules from a sample. For example, a sample is applied to a first adsorbent to extract certain proteins, and an eluant containing non-adsorbent proteins (i.e., proteins that did not bind to the first adsorbent) is collected. Then, the fraction is exposed to a second adsorbent. This further extracts various proteins from the fraction. This second fraction is then exposed to a third adsorbent, and so on.

[0194] Any suitable materials and methods can be used to perform sequential extraction of a sample. For example, a series of spin columns comprising different adsorbents can be used. In another example, a multi-well comprising different adsorbents at its bottom can be used. In another example, sequential extraction can be performed on a probe adapted for use in a gas phase ion spectrometer, wherein the probe surface comprises adsorbents for binding biomolecules. In this embodiment, the sample is applied to a first adsorbent on the probe, which is subsequently washed with an eluant. Markers that do not bind to the first adsorbent is removed with an eluant. The markers that are in the fraction can be applied to a second adsorbent on the probe, and so forth. The advantage of performing sequential extraction on a gas phase ion spectrometer probe is that markers that bind to various adsorbents at every stage of the sequential extraction protocol can be analyzed directly using a gas phase ion spectrometer.

[0195] In yet another embodiment, biomolecules in a sample can be separated by high-resolution electrophoresis, e.g., one or two-dimensional gel electrophoresis. A fraction containing a marker can be isolated and further analyzed by gas phase ion spectrometry. Preferably, two-dimensional gel electrophoresis is used to generate two-dimensional array of spots of biomolecules, including one or more markers. See, e.g., Jungblut and Thiede, Mass Spectr. Rev. 16:145-162 (1997).

[0196] The two-dimensional gel electrophoresis can be performed using methods known in the art. See, e.g., Deutscher ed., Methods In Enzymology vol. 182. Typically, biomolecules in a sample are separated by, e.g., isoelectric focusing, during which biomolecules in a sample are separated in a pH gradient until they reach a spot where their net charge is zero (i.e., isoelectric point). This first separation step results in one-dimensional array of biomolecules. The biomolecules in one-dimensional array is further separated using a technique generally distinct from that used in the first separation step. For example, in the second dimension, biomolecules separated by isoelectric focusing are further separated using a polyacrylamide gel, such as polyacrylamide gel electrophoresis in the presence of sodium dodecyl sulfate (SDS-PAGE). SDS-PAGE gel allows further separation based on molecular mass of biomolecules. Typically, two-dimensional gel electrophoresis can separate chemically different biomolecules in the molecular mass range from 1000-200,000 Da within complex mixtures.

[0197] Biomolecules in the two-dimensional array can be detected using any suitable methods known in the art. For example, biomolecules in a gel can be labeled or stained (e.g., Coomassie Blue or silver staining). If gel electrophoresis generates spots that correspond to the molecular weight of one or more markers of the invention, the spot can be is further analyzed by gas phase ion spectrometry. For example, spots can be excised from the gel and analyzed by gas phase ion spectrometry. Alternatively, the gel containing biomolecules can be transferred to an inert membrane by applying an electric field. Then a spot on the membrane that approximately corresponds to the molecular weight of a marker can be analyzed by gas phase ion spectrometry. In gas phase ion spectrometry, the spots can be analyzed using any suitable techniques, such as MALDI or SELDI (e.g., using ProteinChip® array) as described in detail below.

[0198] Prior to gas phase ion spectrometry analysis, it may be desirable to cleave biomolecules in the spot into smaller fragments using cleaving reagents, such as proteases (e.g., trypsin). The digestion of biomolecules into small fragments provides a mass fingerprint of the biomolecules in the spot, which can be used to determine the identity of markers if desired.

[0199] In yet another embodiment, high performance liquid chromatography (HPLC) can-be used to separate a mixture of biomolecules in a sample based on their different physical properties, such as polarity, charge and size. HPLC instruments typically consist of a reservoir of mobile phase, a pump, an injector, a separation column, and a detector. Biomolecules in a sample are separated by injecting an aliquot of the sample onto the column. Different biomolecules in the mixture pass through the column at different rates due to differences in their partitioning behavior between the mobile liquid phase and the stationary phase. A fraction that corresponds to the molecular weight and/or physical properties of one or more markers can be collected. The fraction can then be analyzed by gas phase ion spectrometry to detect markers. For example, the spots can be analyzed using either MALDI or SELDI (e.g., using ProteinChip® array) as described in detail below.

[0200] Optionally, a marker can be modified before analysis to improve its resolution or to determine its identity. For example, the markers may be subject to proteolytic digestion before analysis. Any protease can be used. Proteases, such as trypsin, that are likely to cleave the markers into a discrete number of fragments are particularly useful. The fragments that result from digestion function as a fingerprint for the markers, thereby enabling their detection indirectly. This is particularly useful where there are markers with similar molecular masses that might be confused for the marker in question. Also, proteolytic fragmentation is useful for high molecular weight markers because smaller markers are more easily resolved by mass spectrometry. In another example, biomolecules can be modified to improve detection resolution. For instance, neuraminidase can be used to remove terminal sialic acid residues from glycoproteins to improve binding to an anionic adsorbent (e.g., cationic exchange ProteinChip® arrays) and to improve detection resolution. In another example, the markers can be modified by the attachment of a tag of particular molecular weight that specifically bind to molecular markers, further distinguishing them. Optionally, after detecting such modified markers, the identity of the markers can be further determined by matching the physical and chemical characteristics of the modified markers in a protein database (e.g., SwissProt).

[0201] Detection and Measurement of Markers

[0202] Once captured on a substrate, e.g., biochip or antibody, any suitable method can be used to measure a marker or markers in a sample. For example, markers can be detected and/or measured by a variety of detection methods including for example, gas phase ion spectrometry methods, optical methods, electrochemical methods, atomic force microscopy, radio frequency methods, surface plasmon resonance, ellipsometry and atomic force microscopy.

[0203] SELDI

[0204] One preferred method of detection and/or measurement of the biomarkers uses mass spectrometry, and in particular, “Surface-enhanced laser desorption/ionization” or “SELDI”. SELDI refers to a method of desorption/ionization gas phase ion spectrometry (e.g., mass spectrometry) in which the analyte is captured on the surface of a SELDI probe that engages the probe interface. In “SELDI MS,” the gas phase ion spectrometer is a mass spectrometer. SELDI technology is described in more detail above and as follows.

[0205] Preferably, a laser desorption time-of-flight mass spectrometer is used in embodiments of the invention. In laser desorption mass spectrometry, a substrate or a probe comprising markers is introduced into an inlet system. The markers are desorbed and ionized into the gas phase by laser from the ionization source. The ions generated are collected by an ion optic assembly, and then in a time-of-flight mass analyzer, ions are accelerated through a short high voltage field and let drift into a high vacuum chamber. At the far end of the high vacuum chamber, the accelerated ions strike a sensitive detector surface at a different time. Since the time-of-flight is a function of the mass of the ions, the elapsed time between ion formation and ion detector impact can be used to identify the presence or absence of markers of specific mass to charge ratio.

[0206] Markers on the substrate surface can be desorbed and ionized using gas phase ion spectrometry. Any suitable gas phase ion spectrometers can be used as long as it allows markers on the substrate to be resolved. Preferably, gas phase ion spectrometers allow quantitation of markers.

[0207] In one embodiment, a gas phase ion spectrometer is a mass spectrometer. In a typical mass spectrometer, a substrate or a probe comprising markers on its surface is introduced into an inlet system of the mass spectrometer. The markers are then desorbed by a desorption source such as a laser, fast atom bombardment, high energy plasma, electrospray ionization, thermospray ionization, liquid secondary ion MS, field desorption, etc. The generated desorbed, volatilized species consist of preformed ions or neutrals which are ionized as a direct consequence of the desorption event. Generated ions are collected by an ion optic assembly, and then a mass analyzer disperses and analyzes the passing ions. The ions exiting the mass analyzer are detected by a detector. The detector then translates information of the detected ions into mass-to-charge ratios. Detection of the presence of markers or other substances will typically involve detection of signal intensity. This, in turn, can reflect the quantity and character of markers bound to the substrate. Any of the components of a mass spectrometer (e.g., a desorption source, a mass analyzer, a detector, etc.) can be combined with other suitable components described herein or others known in the art in embodiments of the invention.

[0208] Preferably, a laser desorption time-of-flight mass spectrometer is used in embodiments of the invention. In laser desorption mass spectrometry, a substrate or a probe comprising markers is introduced into an inlet system. The markers are desorbed and ionized into the gas phase by laser from the ionization source. The ions generated are collected by an ion optic assembly, and then in a time-of-flight mass analyzer, ions are accelerated through a short high voltage field and let drift into a high vacuum chamber. At the far end of the high vacuum chamber, the accelerated ions strike a sensitive detector surface at a different time. Since the time-of-flight is a function of the mass of the ions, the elapsed time between ion formation and ion detector impact can be used to identify the presence or absence of markers of specific mass to charge ratio.

[0209] In another embodiment, an ion mobility spectrometer can be used to detect markers. The principle of ion mobility spectrometry is based on different mobility of ions. Specifically, ions of a sample produced by ionization move at different rates, due to their difference in, e.g., mass, charge, or shape, through a tube under the influence of an electric field. The ions (typically in the form of a current) are registered at the detector which can then be used to identify a marker or other substances in a sample. One advantage of ion mobility spectrometry is that it can operate at atmospheric pressure.

[0210] In yet another embodiment, a total ion current measuring device can be used to detect and characterize markers. This device can be used when the substrate has a only a single type of marker. When a single type of marker is on the substrate, the total current generated from the ionized marker reflects the quantity and other characteristics of the marker. The total ion current produced by the marker can then be compared to a control (e.g., a total ion current of a known compound). The quantity or other characteristics of the marker can then be determined.

[0211] Immunoassay

[0212] In another embodiment, an immunoassay can be used to detect and analyze markers in a sample. This method comprises: (a) providing an antibody that specifically binds to a marker; (b) contacting a sample with the antibody; and (c) detecting the presence of a complex of the antibody bound to the marker in the sample.

[0213] An immunoassay is an assay that uses an antibody to specifically bind an antigen (e.g., a marker). The immunoassay is characterized by the use of specific binding properties of a particular antibody to isolate, target, and/or quantify the antigen. The phrase “specifically (or selectively) binds” to an antibody or “specifically (or selectively) immunoreactive with,” when referring to a protein or peptide, refers to a binding reaction that is determinative of the presence of the protein in a heterogeneous population of proteins and other biologics. Thus, under designated immunoassay conditions, the specified antibodies bind to a particular protein at least two times the background and do not substantially bind in a significant amount to other proteins present in the sample. Specific binding to an antibody under such conditions may require an antibody that is selected for its specificity for a particular protein. For example, polyclonal antibodies raised to a marker from specific species such as rat, mouse, or human can be selected to obtain only those polyclonal antibodies that are specifically immunoreactive with that marker and not with other proteins, except for polymorphic variants and alleles of the marker. This selection may be achieved by subtracting out antibodies that cross-react with the marker molecules from other species.

[0214] Using the purified markers or their nucleic acid sequences, antibodies that specifically bind to a marker can be prepared using any suitable methods known in the art. See, e.g., Coligan, Current Protocols in Immunology (1991); Harlow & Lane, Antibodies: A Laboratory Manual (1988); Goding, Monoclonal Antibodies: Principles and Practice (2d ed. 1986); and Kohler & Milstein, Nature 256:495-497 (1975). Such techniques include, but are not limited to, antibody preparation by selection of antibodies from libraries of recombinant antibodies in phage or similar vectors, as well as preparation of polyclonal and monoclonal antibodies by immunizing rabbits or mice (see, e.g., Huse et al., Science 246:1275-1281 (1989); Ward et al., Nature 341:544-546 (1989)). Typically a specific or selective reaction will be at least twice background signal or noise and more typically more than 10 to 100 times background.

[0215] Generally, a sample obtained from a subject can be contacted with the antibody that specifically binds the marker. Optionally, the antibody can be fixed to a solid support to facilitate washing and subsequent isolation of the complex, prior to contacting the antibody with a sample. Examples of solid supports include glass or plastic in the form of, e.g., a microtiter plate, a stick, a bead, or a microbead. Antibodies can also be attached to a probe substrate or ProteinChip® array described above. The sample is preferably a biological fluid sample taken from a subject. Examples of biological fluid samples include blood, serum, plasma, nipple aspirate, urine, tears, saliva etc. In a preferred embodiment, the biological fluid comprises blood serum. The sample can be diluted with a suitable eluant before contacting the sample to the antibody.

[0216] After incubating the sample with antibodies, the mixture is washed and the antibody-marker complex formed can be detected. This can be accomplished by incubating the washed mixture with a detection reagent. This detection reagent may be, e.g., a second antibody which is labeled with a detectable label. Exemplary detectable labels include magnetic beads (e.g., DYNABEADS™), fluorescent dyes, radiolabels, enzymes (e.g., horse radish peroxide, alkaline phosphatase and others commonly used in an ELISA), and calorimetric labels such as colloidal gold or colored glass or plastic beads. Alternatively, the marker in the sample can be detected using an indirect assay, wherein, for example, a second, labeled antibody is used to detect bound marker-specific antibody, and/or in a competition or inhibition assay wherein, for example, a monoclonal antibody which binds to a distinct epitope of the marker is incubated simultaneously with the mixture.

[0217] Methods for measuring the amount of, or presence of, antibody-marker complex include, for example, detection of fluorescence, luminescence, chemiluminescence, absorbance, reflectance, transmittance, birefringence or refractive index (e.g., surface plasmon resonance, ellipsometry, a resonant mirror method, a grating coupler waveguide method or interferometry). Optical methods include microscopy (both confocal and non-confocal), imaging methods and non-imaging methods. Electrochemical methods include voltametry and amperometry methods. Radio frequency methods include multipolar resonance spectroscopy. Methods for performing these assays are readily known in the art. Useful assays include, for example, an enzyme immune assay (EIA) such as enzyme-linked immunosorbent assay (ELISA), a radioimmune assay (RIA), a Western blot assay, or a slot blot assay. These methods are also described in, e.g., Methods in Cell Biology: Antibodies in Cell Biology, volume 37 (Asai, ed. 1993); Basic and Clinical Immunology (Stites & Terr, eds., 7th ed. 1991); and Harlow & Lane, supra.

[0218] Throughout the assays, incubation and/or washing steps may be required after each combination of reagents. Incubation steps can vary from about 5 seconds to several hours, preferably from about 5 minutes to about 24 hours. However, the incubation time will depend upon the assay format, marker, volume of solution, concentrations and the like. Usually the assays will be carried out at ambient temperature, although they can be conducted over a range of temperatures, such as 10° C. to 40° C.

[0219] Immunoassays can be used to determine presence or absence of a marker in a sample as well as the quantity of a marker in a sample. The amount of an antibody-marker complex can be determined by comparing to a standard. A standard can be, e.g., a known compound or another protein known to be present in a sample. As noted above, the test amount of marker need not be measured in absolute units, as long as the unit of measurement can be compared to a control.

[0220] The methods for detecting these markers in a sample have many applications. For example, one or more markers can be measured to aid humaninflammatory bowel disease diagnosis or prognosis. In another example, the methods for detection of the markers can be used to monitor responses in a subject to inflammatory bowel disease treatment. In another example, the methods for detecting markers can be used to assay for and to identify compounds that modulate expression of these markers in vivo or in vitro. In a preferred example, the biomarkers are used to differentiate between the different stages of tumor progression, thus aiding in determining appropriate treatment and extent of metastasis of the tumor.

[0221] Use of Modified Forms of a Biomarker

[0222] It has been found that proteins frequently exist in a sample in a plurality of different forms characterized by a detectably different mass. These forms can result from either, or both, of pre- and post-translational modification. Pre-translational modified forms include allelic variants, slice variants and RNA editing forms. Post-translationally modified forms include forms resulting from proteolytic cleavage (e.g., fragments of a parent protein), glycosylation, phosphorylation, lipidation, oxidation, methylation, cystinylation, sulphonation and acetylation. The collection of proteins including a specific protein and all modified forms of it is referred to herein as a “protein cluster.” The collection of all modified forms of a specific protein, excluding the specific protein, itself, is referred to herein as a “modified protein cluster.” Modified forms of any biomarker of this invention (including any of Markers I through XIII) also may be used, themselves, as biomarkers. In certain cases the modified forms may exhibit better discriminatory power in diagnosis than the specific forms set forth herein.

[0223] Modified forms of a biomarker including any of Markers 1-97, 99-211, 213-264, 266-401 can be initially detected by any methodology that can detect and distinguish the modified from the biomarker. A preferred method for initial detection involves first capturing the biomarker and modified forms of it, e.g., with biospecific capture reagents, and then detecting the captured proteins by mass spectrometry. More specifically, the proteins are captured using biospecific capture reagents, such as antibodies, aptamers or Affibodies that recognize the biomarker and modified forms of it. This method also will also result in the capture of protein interactors that are bound to the proteins or that are otherwise recognized by antibodies and that, themselves, can be biomarkers. Preferably, the biospecific capture reagents are bound to a solid phase. Then, the captured proteins can be detected by SELDI mass spectrometry or by eluting the proteins from the capture reagent and detecting the eluted proteins by traditional MALDI or by SELDI. The use of mass spectrometry is especially attractive because it can distinguish and quantify modified forms of a protein based on mass and without the need for labeling.

[0224] Preferably, the biospecific capture reagent is bound to a solid phase, such as a bead, a plate, a membrane or a chip. Methods of coupling biomolecules, such as antibodies, to a solid phase are well known in the art. They can employ, for example, bifunctional linking agents, or the solid phase can be derivatized with a reactive group, such as an epoxide or an imidizole, that will bind the molecule on contact. Biospecific capture reagents against different target proteins can be mixed in the same place, or they can be attached to solid phases in different physical or addressable locations. For example, one can load multiple columns with derivatized beads, each column able to capture a single protein cluster. Alternatively, one can pack a single column with different beads derivatized with capture reagents against a variety of protein clusters, thereby capturing all the analytes in a single place. Accordingly, antibody-derivatized bead-based technologies, such as xMAP technology of Luminex (Austin, Tex.) can be used to detect the protein clusters. However, the biospecific capture reagents must be specifically directed toward the members of a cluster in order to differentiate them.

[0225] In yet another embodiment, the surfaces of biochips can be derivatized with the capture reagents directed against protein clusters either in the same location or in physically different addressable locations. One advantage of capturing different clusters in different addressable locations is that the analysis becomes simpler.

[0226] After identification of modified forms of a protein and correlation with the clinical parameter of interest, the modified form can be used as a biomarker in any of the methods of this invention. At this point, detection of the modified from can be accomplished by any specific detection methodology including affinity capture followed by mass spectrometry, or traditional immunoassay directed specifically the modified form. Immunoassay requires biospecific capture reagents, such as antibodies, to capture the analytes. Furthermore, if the assay must be designed to specifically distinguish protein and modified forms of protein. This can be done, for example, by employing a sandwich assay in which one antibody captures more than one form and second, distinctly labeled antibodies, specifically bind, and provide distinct detection of, the various forms. Antibodies can be produced by immunizing animals with the biomolecules. This invention contemplates traditional immunoassays including, for example, sandwich immunoassays including ELISA or fluorescence-based immunoassays, as well as other enzyme immunoassays.

[0227] Data Analysis

[0228] The methods for detecting these markers in a sample have many applications. For example, one or more markers can be measured to aid human inflammatory bowel disease diagnosis or prognosis. In another example, the methods for detection of the markers can be used to monitor responses in a subject to inflammatory bowel disease treatment. In another example, the methods for detecting markers can be used to assay for and to identify compounds that modulate expression of these markers in vivo or in vitro.

[0229] Differentiation of non-inflammatory bowel disease and inflammatory bowel disease status may be by the detection of one or more of the Markers listed in Tables 1-3 or the Markers described as proteins or pathways for IBD, UC, or CD. For example, an exemplary marker that may independently discriminate between colorectal and non-colorectal status is Markers 1-75. Combinations of markers are also useful in the methods of the invention for the discrimination of on-inflammatory bowel disease and inflammatory bowel disease status, for example, Markers may also be used to discriminate or distinguish or diagnose between UC and CD and between unaffected and affected tissue of a UC and/or CD subject.

[0230] Markers may be detected, determined, monitored in a sample by molecular biological methods, including, arrays (nucleic acid, protein), PCR methods (real-time, reverse transcriptase, PCR).

[0231] Detection of markers can be analyzed using any suitable means, including arrays. Nucleic acid arrays may be analyzed using software, for example, Applied Maths, Belgium. GenExplore™: 2-way cluster analysis, principal component analysis, discriminant analysis, self-organizing maps; BioDiscovery, Inc., Los Angeles, Calif. (ImaGene™, special image processing and data extraction software, powered by MatLab®; GeneSight: hierarchical clustering, artificial neural network (SOM?), principal component analysis, time series; AutoGene™; CloneTracker™); GeneData AG (Basel, Switzerland); Molecular Pattern Recognition web site at MIT's Whitehead Genome Center; Rosetta Inpharmatics, Kirkland, Wash. Resolver™ Expression Data Analysis System; Scanalytics, Inc., Fairfax, Va. Its MicroArray Suite enables researchers to acquire, visualize, process, and analyze gene expression microarray data; TIGR (The Institute for Genome Research) offers software tools (free for academic institutions) for array analysis. For example, see also Eisen M B, Brown PO., Methods Enzymol. 1999; 303:179-205.

[0232] Detection of markers can be analyzed using any suitable means. In one embodiment, data generated, for example, by desorption is analyzed with the use of a programmable digital computer. The computer program generally contains a readable medium that stores codes. Certain code can be devoted to memory that includes the location of each feature on a probe, the identity of the adsorbent at that feature and the elution conditions used to wash the adsorbent. The computer also contains code that receives as input, data on the strength of the signal at various molecular masses received from a particular addressable location on the probe. This data can indicate the number of markers detected, including the strength of the signal generated by each marker.

[0233] Data analysis can include the steps of determining signal strength (e.g., height of peaks) of a marker detected and removing “outliers” (data deviating from a predetermined statistical distribution). The observed peaks can be normalized, a process whereby the height of each peak relative to some reference is calculated. For example, a reference can be background noise generated by instrument and chemicals (e.g., energy absorbing molecule) which is set as zero in the scale. Then the signal strength detected for each marker or other biomolecules can be displayed in the form of relative intensities in the scale desired (e.g., 100). Alternatively, a standard (e.g., a serum protein) may be admitted with the sample so that a peak from the standard can be used as a reference to calculate relative intensities of the signals observed for each marker or other markers detected.

[0234] The computer can transform the resulting data into various formats for displaying. In one format, referred to as “spectrum view or retentate map,” a standard spectral view can be displayed, wherein the view depicts the quantity of marker reaching the detector at each particular molecular weight. In another format, referred to as “peak map,” only the peak height and mass information are retained from the spectrum view, yielding a cleaner image and enabling markers with nearly identical molecular weights to be more easily seen. In yet another format, referred to as “gel view,” each mass from the peak view can be converted into a grayscale image based on the height of each peak, resulting in an appearance similar to bands on electrophoretic gels. In yet another format, referred to as “3-D overlays,” several spectra can be overlaid to study subtle changes in relative peak heights. In yet another format, referred to as “difference map view,” two or more spectra can be compared, conveniently highlighting unique markers and markers which are up- or down-regulated between samples. Marker profiles (spectra) from any two samples may be compared visually. In yet another format, Spotfire Scatter Plot can be used, wherein markers that are detected are plotted as a dot in a plot, wherein one axis of the plot represents the apparent molecular of the markers detected and another axis represents the signal intensity of markers detected. For each sample, markers that are detected and the amount of markers present in the sample can be saved in a computer readable medium. This data can then be compared to a control (e.g., a profile or quantity of markers detected in control, e.g., men in whom human inflammatory bowel disease is undetectable).

[0235] When the sample is measured and data is generated, e.g., by mass spectrometry, the data is then analyzed by a computer software program. Generally, the software can comprise code that converts signal from the mass spectrometer into computer readable form. The software also can include code that applies an algorithm to the analysis of the signal to determine whether the signal represents a “peak” in the signal corresponding to a marker of this invention, or other useful markers. The software also can include code that executes an algorithm that compares signal from a test sample to a typical signal characteristic of “normal” and human IBD and determines the closeness of fit between the two signals. The software also can include code indicating which the test sample is closest to, thereby providing a probable diagnosis.

[0236] In preferred methods of the present invention, multiple biomarkers are measured. The use of multiple biomarkers increases the predictive value of the test and provides greater utility in diagnosis, toxicology, patient stratification and patient monitoring. The process called “Pattern recognition” detects the patterns formed by multiple biomarkers greatly improves the sensitivity and specificity of clinical proteomics for predictive medicine. Subtle variations in data from clinical samples, e.g., obtained using SELDI, indicate that certain patterns of protein expression can predict phenotypes such as the presence or absence of a certain disease, a particular stage of IBD-progression, or a positive or adverse response to drug treatments.

[0237] Data generation in mass spectrometry begins with the detection of ions by an ion detector as described above. Ions that strike the detector generate an electric potential that is digitized by a high speed time-array recording device that digitally captures the analog signal. Ciphergen's ProteinChip® system employs an analog-to-digital converter (ADC) to accomplish this. The ADC integrates detector output at regularly spaced time intervals into time-dependent bins. The time intervals typically are one to four nanoseconds long. Furthermore, the time-of-flight spectrum ultimately analyzed typically does not represent the signal from a single pulse of ionizing energy against a sample, but rather the sum of signals from a number of pulses. This reduces noise and increases dynamic range. This time-of-flight data is then subject to data processing. In Ciphergen's ProteinChip software, data processing typically includes TOF-to-M/Z transformation, baseline subtraction, high frequency noise filtering.

[0238] TOF-to-M/Z transformation involves the application of an algorithm that transforms times-of-flight into mass-to-charge ratio (M/Z). In this step, the signals are converted from the time domain to the mass domain. That is, each time-of-flight is converted into mass-to-charge ratio, or M/Z. Calibration can be done internally or externally. In internal calibration, the sample analyzed contains one or more analytes of known M/Z. Signal peaks at times-of-flight representing these massed analytes are assigned the known M/Z. Based on these assigned M/Z ratios, parameters are calculated for a mathematical function that converts times-of-flight to M/Z. In external calibration, a function that converts times-of-flight to M/Z, such as one created by prior internal calibration, is applied to a time-of-flight spectrum without the use of internal calibrants.

[0239] Baseline subtraction improves data quantification by eliminating artificial, reproducible instrument offsets that perturb the spectrum. It involves calculating a spectrum baseline using an algorithm that incorporates parameters such as peak width, and then subtracting the baseline from the mass spectrum.

[0240] High frequency noise signals are eliminated by the application of a smoothing function. A typical smoothing function applies a moving average function to each time-dependent bin. In an improved version, the moving average filter is a variable width digital filter in which the bandwidth of the filter varies as a function of, e.g., peak bandwidth, generally becoming broader with increased time-of-flight. See, e.g., WO 00/70648, Nov. 23, 2000 (Gavin et al., “Variable Width Digital Filter for Time-of-flight Mass Spectrometry”).

[0241] Analysis generally involves the identification of peaks in the spectrum that represent signal from an analyte. Peak selection can, of course, be done by eye. However, software is available as part of Ciphergen's ProteinChip® software that can automate the detection of peaks. In general, this software functions by identifying signals having a signal-to-noise ratio above a selected threshold and labeling the mass of the peak at the centroid of the peak signal. In one useful application many spectra are compared to identify identical peaks present in some selected percentage of the mass spectra. One version of this software clusters all peaks appearing in the various spectra within a defined mass range, and assigns a mass (M/Z) to all the peaks that are near the mid-point of the mass (M/Z) cluster.

[0242] Peak data from one or more spectra can be subject to further analysis by, for example, creating a spreadsheet in which each row represents a particular mass spectrum, each column represents a peak in the spectra defined by mass, and each cell includes the intensity of the peak in that particular spectrum. Various statistical or pattern recognition approaches can applied to the data.

[0243] The spectra that are generated in embodiments of the invention can be classified using a pattern recognition process that uses a classification model. In some embodiments, data derived from the spectra (e.g., mass spectra or time-of-flight spectra) that are generated using samples such as “known samples” can then be used to “train” a classification model. A “known sample” is a sample that is pre-classified (e.g., inflammatory bowel disease or not inflammatory bowel disease). Data derived from the spectra (e.g., mass spectra or time-of-flight spectra) that are generated using samples such as “known samples” can then be used to “train” a classification model. A “known sample” is a sample that is pre-classified. The data that are derived from the spectra and are used to form the classification model can be referred to as a “training data set”. Once trained, the classification model can recognize patterns in data derived from spectra generated using unknown samples. The classification model can then be used to classify the unknown samples into classes. This can be useful, for example, in predicting whether or not a particular biological sample is associated with a certain biological condition (e.g., diseased vs. non diseased).

[0244] The training data set that is used to form the classification model may comprise raw data or pre-processed data. In some embodiments, raw data can be obtained directly from time-of-flight spectra or mass spectra, and then may be optionally “pre-processed” in any suitable manner. For example, signals above a predetermined signal-to-noise ratio can be selected so that a subset of peaks in a spectrum is selected, rather than selecting all peaks in a spectrum. In another example, a predetermined number of peak “clusters” at a common value (e.g., a particular time-of-flight value or mass-to-charge ratio value) can be used to select peaks. Illustratively, if a peak at a given mass-to-charge ratio is in less than 50% of the mass spectra in a group of mass spectra, then the peak at that mass-to-charge ratio can be omitted from the training data set. Pre-processing steps such as these can be used to reduce the amount of data that is used to train the classification model.

[0245] Classification models can be formed using any suitable statistical classification (or “learning”) method that attempts to segregate bodies of data into classes based on objective parameters present in the data. Classification methods may be either supervised or unsupervised. Examples of supervised and unsupervised classification processes are described in Jain, “Statistical Pattern Recognition: A Review”, IEEE Transactions on Pattern Analysis and Machine Intelligence, Vol. 22, No. 1, January 2000, which is herein incorporated by reference in its entirety.

[0246] In supervised classification, training data containing examples of known categories are presented to a learning mechanism, which learns one more sets of relationships that define each of the known classes. New data may then be applied to the learning mechanism, which then classifies the new data using the learned relationships. Examples of supervised classification processes include linear regression processes (e.g., multiple linear regression (MLR), partial least squares (PLS) regression and principal components regression (PCR)), binary decision trees (e.g., recursive partitioning processes such as CART—classification and regression trees), artificial neural networks such as backpropagation networks, discriminant analyses (e.g., Bayesian classifier or Fischer analysis), logistic classifiers, and support vector classifiers (support vector machines).

[0247] A preferred supervised classification method is a recursive partitioning process. Recursive partitioning processes use recursive partitioning trees to classify spectra derived from unknown samples. Further details about recursive partitioning processes are provided in U.S. 2002 0138208 A1 (Paulse et al., “Method for analyzing mass spectra,” Sep. 26, 2002.

[0248] In other embodiments, the classification models that are created can be formed using unsupervised learning methods. Unsupervised classification attempts to learn classifications based on similarities in the training data set, without pre classifying the spectra from which the training data set was derived. Unsupervised learning methods include cluster analyses. A cluster analysis attempts to divide the data into “clusters” or groups that ideally should have members that are very similar to each other, and very dissimilar to members of other clusters. Similarity is then measured using some distance metric, which measures the distance between data items, and clusters together data items that are closer to each other. Clustering techniques include the MacQueen's K-means algorithm and the Kohonen's Self-Organizing Map algorithm.

[0249] Learning algorithms asserted for use in classifying biological information are described in, for example, WO 01/31580 (Barnhill et al., “Methods and devices for identifying patterns in biological systems and methods of use thereof,” May 3, 2001); U.S. 2002/0193950 A1 (Gavin et al., “Method or analyzing mass spectra,” Dec. 19, 2002); U.S. 2003/0004402 A1 (Hitt et al., “Process for discriminating between biological states based on hidden patterns from biological data,” Jan. 2, 2003); and U.S. 2003/0055615 A1 (Zhang and Zhang, “Systems and methods for processing biological expression data” Mar. 20, 2003).

[0250] More specifically, to obtain the biomarkers the peak intensity data of samples from subjects, e.g., IBD subjects, and healthy controls are used as a “discovery set.” This data were combined and randomly divided into a training set and a test set to construct and test multivariate predictive models using a non-linear version of Unified Maximum Separability Analysis (“USMA”) classifiers. Details of USMA classifiers are described in U.S. 2003/0055615 A1.

[0251] The invention provides methods for aiding a human inflammatory bowel disease diagnosis using one or more markers, for example Markers in the tables and figures which follow, and including one or more Markers 1-97, 99-211, 213-264, 266-401 as specified herein. These markers can be used alone, in combination with other markers in any set, or with entirely different markers in aiding human inflammatory bowel disease diagnosis. The markers are differentially present in samples of a human inflammatory bowel disease patient and a normal subject in whom human inflammatory bowel disease is undetectable. For example, some of the markers are expressed at an elevated level and/or are present at a higher frequency in human inflammatory bowel disease subjects than in normal subjects, while some of the markers are expressed at a decreased level and/or are present at a lower frequency in human inflammatory bowel disease subjects than in normal subjects. Therefore, detection of one or more of these markers in a person would provide useful information regarding the probability that the person may have inflammatory bowel disease.

[0252] Differentiation Between Normal and Unaffected Disease Tissue

[0253] The invention provides methods for aiding a human inflammatory bowel disease diagnosis using one or more markers, for example Markers in the tables and figures which follow, and including one or more Markers 1-97, 99-211, 213-264, 266-401 as specified herein. These markers can be used alone, in combination with other markers in any set, or with entirely different markers in aiding human inflammatory bowel disease diagnosis. The markers are differentially present in samples of a human inflammatory bowel disease patient and a normal subject in whom human inflammatory bowel disease is undetectable. For example, some of the markers are expressed at an elevated level and/or are present at a higher frequency in human inflammatory bowel disease subjects than in normal subjects, while some of the markers are expressed at a decreased level and/or are present at a lower frequency in human inflammatory bowel disease subjects than in normal subjects. Therefore, detection of one or more of these markers in a person would provide useful information regarding the probability that the person may have inflammatory bowel disease.

[0254] In a preferred embodiment, a biological sample is collected from a patient and then either left unfractionated, or fractionated using an anion exchange resin as described above. The biomarkers in the sample are captured using an ProteinChip array. The markers are then detected using SELDI. The results are then entered into a computer system, which contains an algorithm that is designed using the same parameters that were used in the learning algorithm and classification algorithm to originally determine the biomarkers. The algorithm produces a diagnosis based upon the data received relating to each biomarker.

[0255] The diagnosis is determined by examining the data produced from the tests with algorithms that are developed using the biomarkers. The algorithms depend on the particulars of the test protocol used to detect the biomarkers. These particulars include, for example, sample preparation, chip type and mass spectrometer parameters. If the test parameters change, the algorithm must change. Similarly, if the algorithm changes, the test protocol must change.

[0256] In another embodiment, the sample is collected from the patient. The biomarkers are captured using an antibody ProteinChip array as described above. The markers are detected using a biospecific SELDI test system. The results are then entered into a computer system, which contains an algorithm that is designed using the same parameters that were used in the learning algorithm and classification algorithm to originally determine the biomarkers. The algorithm produces a diagnosis based upon the data received relating to each biomarker.

[0257] In yet other preferred embodiments, the markers are captured and tested using non-SELDI formats. In one example, the sample is collected from the patient. The biomarkers are captured on a substrate using other known means, e.g., antibodies to the markers. The markers are detected using methods known in the art, e.g., optical methods and refractive index. Examples of optical methods include detection of fluorescence, e.g., ELISA. Examples of refractive index include surface plasmon resonance. The results for the markers are then subjected to an algorithm, which may or may not require artificial intelligence. The algorithm produces a diagnosis based upon the data received relating to each biomarker.

[0258] In any of the above methods, the data from the sample may be fed directly from the detection means into a computer containing the diagnostic algorithm. Alternatively, the data obtained can be fed manually, or via an automated means, into a separate computer that contains the diagnostic algorithm.

[0259] Accordingly, embodiments of the invention include methods for aiding a human inflammatory bowel disease diagnosis, wherein the method comprises: (a) detecting at least one marker in a sample, wherein the marker is selected from any of the Markers 1-97, 99-211, 213-264, 266-401; and (b) correlating the detection of the marker or markers with a probable diagnosis of human inflammatory bowel disease. The correlation may take into account the amount of the marker or markers in the sample compared to a control amount of the marker or markers (up or down regulation of the marker or markers) (e.g., in normal subjects in whom human inflammatory bowel disease is undetectable). The correlation may take into account the presence or absence of the markers in a test sample and the frequency of detection of the same markers in a control. The correlation may take into account both of such factors to facilitate determination of whether a subject has a human inflammatory bowel disease or not.

[0260] In a preferred embodiment, Markers 1-97, 99-211, 213-264, 266-401 are used to make a correlation with inflammatory bowel disease, wherein the inflammatory bowel disease may be any subtype, e.g., Crohn's disease or ulcerative colitis.

[0261] Any suitable samples can be obtained from a subject to detect markers. Preferably, a sample is a colon or intestinal biopsy, e.g., an endoscopic biopsy sample from the subject. If desired, the sample can be prepared as described above to enhance detectability of the markers. For example, to increase the detectability of markers, a sample from the subject can be preferably fractionated by, e.g., Cibacron blue agarose chromatography and single stranded DNA affinity chromatography, anion exchange chromatography and the like. Sample preparations, such as pre-fractionation protocols, are optional and may not be necessary to enhance detectability of markers depending on the methods of detection used. For example, sample preparation may be unnecessary if antibodies that specifically bind markers are used to detect the presence of markers in a sample.

[0262] Processes for the purification of a biomarker include fractioning a sample, as described herein, for example, by size-exclusion chromatography and collecting a fraction that includes one or more biomarkers; and/or fractionating a sample comprising the one or more biomarkers by anion exchange chromatography and collecting a fraction that includes one or more biomarkers, wherein the biomarker is selected from one or more of the biomarkers of Tables 1-9.

### IBD Candidate Genes

[0263] In one aspect the invention also includes IBD candidate genes. These genes include, for example, apoptosis-regulating CASP10 at 2q33-34, LILRB1 at 19q13.4 (locus IBD6) and antigen-presenting genes PSME2 at 14q11.2 (locus IBD4). With respect to the IBD3 locus at 6p21,³⁵ HLA-DMA, TAP1, UBD and PSMB8 (immunoproteasome for generating MHC class I binding antigenic peptides), at 6p21.3, are particularly intriguing. GNGT1 (7q21.3) functioning in apoptosis and PRKACB (1p36.1, IBD7), involved in Wnt-signaling from the UC signature are also good candidates. The sequences of these genes are appended to the end of this specification, as well as exemplary primers for detecting or amplifying the makers.

### Diagnosis of Subject and Determination of Inflammatory Bowel Disease Status

[0264] Any biomarker, individually, is useful in aiding in the determination of inflammatory bowel disease status. First, the selected biomarker is measured in a subject sample using the methods described herein, e.g., capture on a SELDI biochip followed by detection by mass spectrometry. Then, the measurement is compared with a diagnostic amount or control that distinguishes a inflammatory bowel disease status from a non-inflammatory bowel disease status. The diagnostic amount will reflect the information herein that a particular biomarker is up-regulated or down-regulated in a inflammatory bowel disease status compared with a non-inflammatory bowel disease status. As is well understood in the art, the particular diagnostic amount used can be adjusted to increase sensitivity or specificity of the diagnostic assay depending on the preference of the diagnostician. The test amount as compared with the diagnostic amount thus indicates inflammatory bowel disease status.

[0265] While individual biomarkers are useful diagnostic markers, it has been found that a combination of biomarkers provides greater predictive value than single markers alone. Specifically, the detection of a plurality of markers in a sample increases the percentage of true positive and true negative diagnoses and would decrease the percentage of false positive or false negative diagnoses. Thus, preferred methods of the present invention comprise the measurement of more than one biomarker.

[0266] The detection of the marker or markers is then correlated with a probable diagnosis of inflammatory bowel disease. In some embodiments, the detection of the mere presence or absence of a marker, without quantifying the amount of marker, is useful and can be correlated with a probable diagnosis of inflammatory bowel disease. For example, biomarkers 1-97, 99-211, 213-264, 266-401 can be more frequently detected in human inflammatory bowel disease subjects than in normal subjects. A mere detection of one or more of these markers in a subject being tested indicates that the subject has a higher probability of having inflammatory bowel disease. In another embodiment, biomarkers 61-75 can be less frequently detected in human UC disease subjects than in normal subjects, and/or in subjects who have CD. The mere detection of one or more of these markers in a subject being tested indicates that the subject has a lower probability of having inflammatory bowel disease.

[0267] In other embodiments, the measurement of markers can involve quantifying the markers to correlate the detection of markers with a probable diagnosis of inflammatory bowel disease. Thus, if the amount of the markers detected in a subject being tested is different compared to a control amount (i.e., higher or lower than the control, depending on the marker), then the subject being tested has a higher probability of having inflammatory bowel disease.

[0268] The correlation may take into account the amount of the marker or markers in the sample compared to a control amount of the marker or markers (up or down regulation of the marker or markers) (e.g., in normal subjects or in non-inflammatory bowel disease subjects such as where inflammatory bowel disease is undetectable). A control can be, e.g., the average or median amount of marker present in comparable samples of normal subjects in normal subjects or in non-inflammatory bowel disease subjects such as where inflammatory bowel disease is undetectable. The control amount is measured under the same or substantially similar experimental conditions as in measuring the test amount. The correlation may take into account the presence or absence of the markers in a test sample and the frequency of detection of the same markers in a control. The correlation may take into account both of such factors to facilitate determination of inflammatory bowel disease status.

[0269] In certain embodiments of the methods of qualifying inflammatory bowel disease status, the methods further comprise managing subject treatment based on the status. As before the, management of the subject describes the actions of the physician or clinician subsequent to determining inflammatory bowel disease status. For example, if the result of the methods of the present invention is inconclusive or there is reason that confirmation of status is necessary, the physician may order more tests (e.g., colonoscopy and imaging techniques). Alternatively, if the status indicates that treatment is appropriate, the physician may schedule the patient for treatment. In other instances, the patient may receive therapeutic treatments, either in lieu of, or in addition to, surgery. No further action may be warranted. Furthermore, if the results show that treatment has been successful, a maintenance therapy or no further management may be necessary.

[0270] Therapeutic agents may include, one or more of sulfa drugs, corticosteriods (prednisone), 5-aminosalicylates (Asacol, Pentasa, Rowasa, or 5-ASA), immunosuppressives (azathioprine, Imuran, Cyclosporine, 6-MP, Purinethol and Methotrexate), anti-TNF (Remicade), anticholinergics, dicyclomine (Bentyl), belladonna/phenobarbital (Donnatal, Antispas, bBarbidonna, donnapine, hyosophen, Spasmolin), hyoscyamine (Levsin, Anaspaz), chlordiazepoxide/clidinium (Librax), anti-diarrheals, diphenoxylate/atropine (Lomotil), alosetron hydrochloride (Lotronex), tegaserod (Zelnorm, Zelmac), rifaximin (Xifaxin), sulfasalazine (Azulfadine), mesalamine (Asacol, Pentasa, Rowasa), osalazine (Dipentum), (Colazal), corticosteroids (prednisone), balsalazide disodium (Colazal®), cyclosporine, methotrexate, infliximab (Remicade), rifaximin, and budesonide (Entocort EC)

[0271] The invention also provides for such methods where the biomarkers (or specific combination of biomarkers) are measured again after subject management. In these cases, the methods are used to monitor the status of the inflammatory bowel disease, e.g., response to inflammatory bowel disease treatment, remission of the disease or progression of the disease. Because of the ease of use of the methods and the lack of invasiveness of the methods, the methods can be repeated after each treatment the patient receives. This allows the physician to follow the effectiveness of the course of treatment. If the results show that the treatment is not effective, the course of treatment can be altered accordingly. This enables the physician to be flexible in the treatment options.

[0272] In another example, the methods for detecting markers can be used to assay for and to identify compounds that modulate expression of these markers in vivo or in vitro.

[0273] The methods of the present invention have other applications as well. For example, the markers can be used to screen for compounds that modulate the expression of the markers in vitro or in vivo, which compounds in turn may be useful in treating or preventing inflammatory bowel disease in subjects. In another example, the markers can be used to monitor the response to treatments for inflammatory bowel disease. In yet another example, the markers can be used in heredity studies to determine if the subject is at risk for developing inflammatory bowel disease. For instance, certain markers may be genetically linked. This can be determined by, e.g., analyzing samples from a population of inflammatory bowel disease subjects whose families have a history of inflammatory bowel disease. The results can then be compared with data obtained from, e.g., inflammatory bowel disease subjects whose families do not have a history of inflammatory bowel disease. The markers that are genetically linked may be used as a tool to determine if a subject whose family has a history of inflammatory bowel disease is pre-disposed to having inflammatory bowel disease.

[0274] In a preferred embodiment of the invention, a diagnosis based on the presence or absence in a test subject of any the biomarkers of this invention is communicated to the subject as soon as possible after the diagnosis is obtained. The diagnosis may be communicated to the subject by the subject's treating physician. Alternatively, the diagnosis may be sent to a test subject by email or communicated to the subject by phone. A computer may be used to communicate the diagnosis by email or phone. In certain embodiments, the message containing results of a diagnostic test may be generated and delivered automatically to the subject using a combination of computer hardware and software which will be familiar to artisans skilled in telecommunications. One example of a healthcare-oriented communications system is described in U.S. Pat. No. 6,283,761; however, the present invention is not limited to methods which utilize this particular communications system. In certain embodiments of the methods of the invention, all or some of the method steps, including the assaying of samples, diagnosing of diseases, and communicating of assay results or diagnoses, may be carried out in diverse (e.g., foreign) jurisdictions.

[0275] Methods of the invention for determining the inflammatory bowel disease status of a subject, include for example, obtaining a biomarker profile from a sample taken from the subject; and comparing the subject's biomarker profile to a reference biomarker profile obtained from a reference population, wherein the comparison is capable of classifying the subject as belonging to or not belonging to the reference population; wherein the subject's biomarker profile and the reference biomarker profile comprise one or more markers listed in Tables 1-9.

[0276] The method may further comprise repeating the method at least once, wherein the subject's biomarker profile is obtained from a separate sample taken each time the method is repeated.

[0277] Samples from the subject may be taken at any time, for example, the samples may be taken 24 hours apart or any other time determined useful.

[0278] Such comparisons of the biomarker profiles can determine inflammatory bowel disease status in the subject with an accuracy of at least about 60%, 70%, 80%, 90%, 95%, and approaching 100% as shown in the examples which follow.

[0279] The reference biomarker profile can be obtained from a population comprising a single subject, at least two subjects, at least 20 subjects or more. The number of subjects will depend, in part, on the number of available subjects, and the power of the statistical analysis necessary.

[0280] A method of treating inflammatory bowel disease comprising administering to a subject suffering from or at risk of developing inflammatory bowel disease a therapeutically effective amount of a compound capable of modulating the expression or activity of one or more of the biomarkers of Tables 1-9.

[0281] A method of treating a condition in a subject comprising administering to a subject a therapeutically effective amount of a compound which modulates the expression or activity of one or more of the biomarkers of Tables 1-9.

[0282] Compounds useful in methods disclosed herein include, for example, sulfa drugs, corticosteriods (prednisone), 5-aminosalicylates (Asacol, Pentasa, Rowasa, or 5-ASA), immunosuppressives (azathioprine, Imuran, Cyclosporine, 6-MP, Purinethol and Methotrexate), anti-TNF (Remicade), anticholinergics, dicyclomine (Bentyl), belladonna/phenobarbital (Donnatal, Antispas, bBarbidonna, donnapine, hyosophen, Spasmolin), hyoscyamine (Levsin, Anaspaz), chlordiazepoxide/clidinium (Librax), anti-diarrheals, diphenoxylate/atropine (Lomotil), alosetron hydrochloride (Lotronex), tegaserod (Zelnorm, Zelmac), rifaximin (Xifaxin), sulfasalazine (Azulfadine), mesalamine (Asacol, Pentasa, Rowasa), osalazine (Dipentum), (Colazal), corticosteroids (prednisone), balsalazide disodium (Colazal®), cyclosporine, methotrexate, infliximab (Remicade), rifaximin, and budesonide (Entocort EC)

[0283] A method of qualifying inflammatory bowel disease status in a subject comprising:

[0284] (a) measuring at least one biomarker in a sample from the subject, wherein the biomarker is selected from one or more of the biomarkers of Tables 1-9, and

[0285] (b) correlating the measurement with inflammatory bowel disease status.

[0286] The method may also comprise the step of measuring the at least one biomarker after subject management.

[0287] Optionally, the methods of the invention may further comprise generating data on immobilized subject samples on a biochip, by subjecting the biochip to laser ionization and detecting intensity of signal for mass/charge ratio; and transforming the data into computer readable form; and executing an algorithm that classifies the data according to user input parameters, for detecting signals that represent biomarkers present in inflammatory bowel disease subjects and are lacking in non-inflammatory bowel disease subject controls.

[0288] Types of inflammatory bowel disease that may be identified or differentiated from one another according to this method include UC and CD.

[0289] Kits

[0290] In one aspect, the invention provides kits for the analysis of IBD status. The kits include PCR primers for at least one marker selected from Markers 1-75. In preferred embodiments, the kit includes more than two or three markers selected from Markers 1-75. The kit may further include instructions for use and correlation of the maker with disease status. For example, the presence of any one of Markers 1-31 indicate CD; the presence of any one of Markers 32-48 indicate IBD; the increased presence of any one of Markers 49-60 indicate UC and the decreased presence of any one of Markers 61-75 indicate UC. The kit may also include a DNA array containing the complement of one or more of the Markers selected from 1-75, reagents, and/or enzymes for amplifying or isolating sample DNA. The kits may include reagents for real-time PCR, for example, TaqMan probes and/or primers, and enzymes.

[0291] In yet another aspect, the invention provides kits for qualifying inflammatory bowel disease status and/or aiding a diagnosis of human inflammatory bowel disease, wherein the kits can be used to detect the markers of the present invention. For example, the kits can be used to detect any one or more of the markers described herein, which markers are differentially present in samples of inflammatory bowel disease subjects and normal subjects. The kits of the invention have many applications. For example, the kits can be used to differentiate if a subject has inflammatory bowel disease or has a negative diagnosis, thus aiding a human inflammatory bowel disease diagnosis. In another example, the kits can be used to identify compounds that modulate expression of one or more of the markers in in vitro or in vivo animal models for inflammatory bowel disease.

[0292] In one embodiment, a kit comprises: (a) a substrate comprising an adsorbent thereon, wherein the adsorbent is suitable for binding a marker, and (b) instructions to detect the marker or markers by contacting a sample with the adsorbent and detecting the marker or markers retained by the adsorbent. In some embodiments, the kit may comprise an eluant (as an alternative or in combination with instructions) or instructions for making an eluant, wherein the combination of the adsorbent and the eluant allows detection of the markers using gas phase ion spectrometry.

[0293] Such kits can be prepared from the materials described above, and the previous discussion of these materials (e.g., probe substrates, adsorbents, washing solutions, etc.) is fully applicable to this section and will not be repeated.

[0294] In another embodiment, the kit may comprise a first substrate comprising an adsorbent thereon (e.g., a particle functionalized with an adsorbent) and a second substrate onto which the first substrate can be positioned to form a probe, which is removably insertable into a gas phase ion spectrometer. In other embodiments, the kit may comprise a single substrate, which is in the form of a removably insertable probe with adsorbents on the substrate. In yet another embodiment, the kit may further comprise a pre-fractionation spin column (e.g., Cibacron blue agarose column, anti-HSA agarose column, K-30 size exclusion column, Q-anion exchange spin column, single stranded DNA column, lectin column, etc.).

[0295] In another embodiment, a kit comprises (a) an antibody that specifically binds to a marker; and (b) a detection reagent. Such kits can be prepared from the materials described above, and the previous discussion regarding the materials (e.g., antibodies, detection reagents, immobilized supports, etc.) is fully applicable to this section and will not be repeated. Optionally, the kit may further comprise pre-fractionation spin columns. In some embodiments, the kit may further comprise instructions for suitable operation parameters in the form of a label or a separate insert.

[0296] Optionally, the kit may further comprise a standard or control information so that the test sample can be compared with the control information standard to determine if the test amount of a marker detected in a sample is a diagnostic amount consistent with a diagnosis of inflammatory bowel disease.

[0297] Use of Biomarkers for Inflammatory Bowel Disease in Screening Assays

[0298] The methods of the present invention have other applications as well. For example, the biomarkers can be used to screen for compounds that modulate the expression of the biomarkers in vitro or in vivo, which compounds in turn may be useful in treating or preventing inflammatory bowel disease in subjects. In another example, the biomarkers can be used to monitor the response to treatments for inflammatory bowel disease. In yet another example, the biomarkers can be used in heredity studies to determine if the subject is at risk for developing inflammatory bowel disease.

[0299] Thus, for example, the kits of this invention could include a solid substrate having a hydrophobic function, such as a protein biochip (e.g., a Ciphergen ProteinChip array) and a buffer for washing the substrate, as well as instructions providing a protocol to measure the biomarkers of this invention on the chip and to use these measurements to diagnose inflammatory bowel disease.

[0300] Method for identifying a candidate compound for treating inflammatory bowel disease may comprise, for example, contacting one or more of the biomarkers of Tables 1-9 with a test compound; and determining whether the test compound interacts with the biomarker, wherein a compound that interacts with the biomarker is identified as a candidate compound for treating inflammatory bowel disease.

[0301] Compounds suitable for therapeutic testing may be screened initially by identifying compounds which interact with one or more biomarkers listed in identified herein. By way of example, screening might include recombinantly expressing a biomarker of this invention, purifying the biomarker, and affixing the biomarker to a substrate. Test compounds would then be contacted with the substrate, typically in aqueous conditions, and interactions between the test compound and the biomarker are measured, for example, by measuring elution rates as a function of salt concentration. Certain proteins may recognize and cleave one or more biomarkers of this invention, in which case the proteins may be detected by monitoring the digestion of one or more biomarkers in a standard assay, e.g., by gel electrophoresis of the proteins.

[0302] In a related embodiment, the ability of a test compound to inhibit the activity of one or more of the biomarkers of this invention may be measured. One of skill in the art will recognize that the techniques used to measure the activity of a particular biomarker will vary depending on the function and properties of the biomarker. For example, an enzymatic activity of a biomarker may be assayed provided that an appropriate substrate is available and provided that the concentration of the substrate or the appearance of the reaction product is readily measurable. The ability of potentially therapeutic test compounds to inhibit or enhance the activity of a given biomarker may be determined by measuring the rates of catalysis in the presence or absence of the test compounds. The ability of a test compound to interfere with a non-enzymatic (e.g., structural) function or activity of one of the biomarkers of this invention may also be measured. For example, the self-assembly of a multi-protein complex which includes one of the biomarkers of this invention may be monitored by spectroscopy in the presence or absence of a test compound. Alternatively, if the biomarker is a non-enzymatic enhancer of transcription, test compounds which interfere with the ability of the biomarker to enhance transcription may be identified by measuring the levels of biomarker-dependent transcription in vivo or in vitro in the presence and absence of the test compound.

[0303] Test compounds capable of modulating the activity of any of the biomarkers of this invention may be administered to subjects who are suffering from or are at risk of developing inflammatory bowel disease. For example, the administration of a test compound which increases the activity of a particular biomarker may decrease the risk of inflammatory bowel disease in a patient if the activity of the particular biomarker in vivo prevents the accumulation of proteins for inflammatory bowel disease. Conversely, the administration of a test compound which decreases the activity of a particular biomarker may decrease the risk of inflammatory bowel disease in a patient if the increased activity of the biomarker is responsible, at least in part, for the onset of inflammatory bowel disease.

[0304] At the clinical level, screening a test compound includes obtaining samples from test subjects before and after the subjects have been exposed to a test compound. The levels in the samples of one or more of the biomarkers of this invention may be measured and analyzed to determine whether the levels of the biomarkers change after exposure to a test compound. The samples may be analyzed by mass spectrometry, as described herein, or the samples may be analyzed by any appropriate means known to one of skill in the art. For example, the levels of one or more of the biomarkers of this invention may be measured directly by Western blot using radio- or fluorescently-labeled antibodies which specifically bind to the biomarkers. Alternatively, changes in the levels of mRNA encoding the one or more biomarkers may be measured and correlated with the administration of a given test compound to a subject. In a further embodiment, the changes in the level of expression of one or more of the biomarkers may be measured using in vitro methods and materials. For example, human tissue cultured cells which-express, or are capable of expressing, one or more of the biomarkers of this invention may be contacted with test compounds. Subjects who have been treated with test compounds will be routinely examined for any physiological effects which may result from the treatment. In particular, the test compounds will be evaluated for their ability to decrease disease likelihood in a subject. Alternatively, if the test compounds are administered to subjects who have previously been diagnosed with inflammatory bowel disease, test compounds will be screened for their ability to slow or stop the progression of the disease.

[0305] Classification Algorithms

[0306] A dataset can be analyzed by multiple classification algorithms. Some classification algorithms provide discrete rules for classification; others provide probability estimates of a certain outcome (class). In the latter case, the decision (diagnosis) is made based on the class with the highest probability. For example, consider the three-class problem: healthy, benign, and IBD. Suppose that a classification algorithm (e.g. Nearest neighbor) is constructed and applied to sample A, and the probability of the sample being healthy is 0, benign is 33%, and IBD is 67%. Sample A would be diagnosed as being IBD. This approach, however, does not take into account any “fuzziness” in the diagnosis i.e. that there was a certain probability that the sample was benign. Therefore, the diagnosis would be the same as for sample B, which has a probability of 0 of being healthy or benign and a probability of 1 of being IBD.

### EXAMPLES

[0307] The following examples are offered by way of illustration, not by way of limitation. While specific examples have been provided, the above description is illustrative and not restrictive. Any one or more of the features of the previously described embodiments can be combined in any manner with one or more features of any other embodiments in the present invention. Furthermore, many variations of the invention will become apparent to those skilled in the art upon review of the specification. The scope of the invention should, therefore, be determined not with reference to the above description, but instead should be determined with reference to the appended claims along with their full scope of equivalents.

[0308] It should be appreciated that the invention should not be construed to be limited to the examples which are now described; rather, the invention should be construed to include any and all applications provided herein and all equivalent variations within the skill of the ordinary artisan.

### Example 1

### Patients and Controls

[0309] Informed consent was obtained from all individuals and diagnosis of patients was based on primary endoscopic, pathologic and radiology reports using standard diagnostic criteria.¹⁶ Consecutive patients undergoing colonoscopy include unrelated CD and UC patients and 4 non-IBD healthy controls (Table 10). Controls were negative for colorectal cancer on screening. All patients received Golytely® colonic preparation.

TABLE 10
Demographics

| | | | Disease | | | | | |
|---|---|---|---|---|---|---|---|---|
| | Age | | | Duration | Endoscopy | | Histology | |
| Sample* | (years) | Sex | location | (years) | Site** | definition | Inflammation# | Fibrosis## |
| CD33un | 24 | M | colonic | 4 | T. colon | unaffected | − | − |
| CD33aff | | | | | sigmoid | affected | ++ | + |
| CD45un | 37 | F | colonic | 12 | A. colon | unaffected | − | − |
| CD45aff | | | | | cecum | unaffected | − | + |
| CD48un1 | 44 | M | ileal | 20 | T. colon | unaffected | − | − |
| CD48un2 | | | | | T. colon | affected | − | − |
| CD49un | 21 | F | ileocolonic | 3 | rectum | unaffected | − | + |
| CD49aff | | | | | cecum | affected | ++ | + |
| CD51un | 39 | M | colonic | 15 | SF. colon | unaffected | + | − |
| CD51aff | | | | | sigmoid | affected | ++ | + |
| CD53un | 55 | M | colonic | 15 | T. colon | unaffected | − | − |
| CD53aff | | | | | rectum | affected | +++ | ++ |
| CD58un | 51 | F | colonic | 10 | D. colon | unaffected | − | − |
| CD58aff | | | | | SF. colon | affected | + | + |
| CD59un | 32 | M | ileocolonic | 15 | D. colon | unaffected | − | − |
| CD59aff | | | | | T. colon | affected | − | − |
| CD76un | 76 | M | colonic | 2 | rectum | unaffected | − | − |
| CD76aff1 | | | | | sigmoid | affected | ++ | ++ |
| CD76aff2 | | | | | sigmoid | affected | ++ | ++ |
| Mean | 42.1 | | | 12 | | | | |
| Range | 21-76 | | | 2-20 | | | | |
| UC32un | 82 | F | colonic | 15 | A. colon | unaffected | − | + |
| UC32aff | | | | | rectum | affected | + | ++ |
| UC35un | 40 | F | colonic | 24 | A. colon | unaffected | − | − |
| UC35aff | | | | | rectum | affected | ++ | ++ |
| UC38un | 60 | M | colonic | 12 | A. colon | unaffected | − | − |
| UC38aff | | | | | sigmoid | affected | + | − |
| UC44un | 45 | M | colonic | 10 | D. colon | unaffected | − | − |
| UC44aff | | | | | sigmoid | affected | + | − |
| UC55un | 64 | F | colonic | 46 | HF. | unaffected | − | − |
| | | | | | colon | | | |
| UC55aff | | | | | rectum | affected | ++ | ++ |
| Mean | 58.2 | | | 15 | | | | |
| Range | 45-82 | | | 10-46 | | | | |
| N65 | 22 | F | | | sigmoid | normal | − | − |
| N66 | 64 | M | | | sigmoid | normal | | |
| N69 | 65 | F | | | sigmoid | normal | − | − |
| N79 | 57 | F | | | sigmoid | normal | − | − |
| Mean | 52 | | | | | | | |
| Range | 22-64 | | | | | | | |

*CD: Crohn's disease, UC: ulcerative colitis, un: unaffected, aff: affected, N: normal control,
**Site of biopsy: T: transverse, A: ascending, D: descending, SF: splenic flexure, HF: hepatic flexure.
#Score based on active (polymorphonuclear) and chronic (lymphoplasmacytic) inflammation.
##Fibrosis score based on extent of lamina propria involvement, splaying of the muscularis mucosa, and crypt dropout (Supplemental FIG. 1)

[0310] Endoscopic Pinch Biopsies

[0311] “Affected” pinch biopsies are from areas appearing affected by endoscopy, “unaffected” biopsies are from an area at least 10 cm away from any grossly diseased area (Table 10). For every microarray sample, histology of an adjacent biopsy was scored for inflammation and fibrosis (A.M.) (Table 10). A four-tier grading scheme (−, +, ++, +++), based on semi-quantitative assessment of mucosal inflammation and fibrosis was used.

[0312] RNA Isolation and Microarray

[0313] Each biopsy, approximately 2×2×3 mm³ and weighing 2-7 mg (mean=4.7 mg, n=6 biopsies), produced ˜5 μg total RNA (TRIzol Reagent, Invitrogen Co), yielding 15 μg of biotin-labeled cRNA (https://www.affymetrix.com/support/technical/manual/). Biotinylated cRNA (10 μg per array) was hybridized to high-density oligonucleotide GeneChip Human Genome U95Av2 arrays (Affymetrix). The arrays were washed and stained (R-Phycoerythrin Streptavidin) in a GeneChip Fluidics Station 400. Images captured in a HP GeneArray Scanner (Affymetrix) were analyzed first by Microarray Suite 5.0 software (Affymetrix). Each transcript received a “present” or “absent” call based on whether the gene transcript was detected in the sample. The background intensities were low (40±0.6 to 52±1.0 arbitrary units), with ˜48.4% to 56.9% of all 12,625 probe sets marked as “present” in the biopsy samples, consistent with our previous study of whole colon tissue resections.⁷

[0314] Data Analysis

[0315] The DNA-Chip Analyzer (dChip) software¹⁷ was used to normalize the data from the image files for array-to-array comparisons (http://www.ncbi.nlm.nih.gov/geo). We used (1) Significance Analysis of Microarrays (SAM) software,¹⁸ to select biologically significant changes in gene expression between groups using the criteria of median FDR ≦0.1%, fold change >2, and Log₂ mean expression index >5.64, and (2) classical Multidimensional Scaling (MDS),¹⁹ that provides a low dimensional, distance-preserving map such that arrays with similar profiles are close on the map, to visualize the data and relationships between samples.

[0316] On comparing gene expression patterns of 2 biopsies, 10 cm apart, from within an affected area of one CD patient (CD-76-aff1 and CD-76-aff2), only 10 genes showed >2 fold difference in expression (from 3384 “present” genes)—an error of 0.29% in independent gene expression measurements of the same affected area. Thus, one endoscopic biopsy is considered a reliable representation of the disease (FIG. 1).

[0317] Analysis of 32 samples by MDS (FIG. 2), placed 11 of 13 affected IBD biopsies above the horizontal axis, in quadrants Q 1 and Q4 separated from unaffected and healthy control samples. Most unaffected and control biopsies (17/19) are below the horizontal axis in Q2 and Q3. Second, UC affected clearly separate from CD affected, except one (UC-32), that by histology showed mild inflammation only and fibrosis of 2+ grade. Among the CD cases, 5 biopsies with active disease appear together in Q1; clinically these have colonic involvement, characterized by rectal sparing. Two other patients (CD-33 and CD-53) with rectal disease and high histopathologic inflammation scores co-localized with the UC affected, possibly representing a CD subgroup resembling UC. CD-45 affected endoscopically, placed in the MDS plot with controls and unaffected was subsequently found to be negative for inflammation and fibrosis by histology.

[0318] To determine the biological differences in samples driving the MDS distribution, genes were sought that were responsible for positioning of the samples in the different quadrants of the MDS map. An analysis of variance on each gene identified those with significant, quadrant specific differences in expression. From the expression pattern of these genes (FIG. 3), three groups are evident. (Group 1): Twenty-seven genes expressed above mean in the controls and in 5 CD individuals are down regulated in four of the five individuals with UC. A majority of these genes code for membrane-bound endoplasmic reticulum-, Golgi apparatus-, or in a few cases lysozomal-proteins. These are primarily epithelial genes that regulate protein trafficking and secretion. The only two CD individuals that manifest this UC pattern are CD 33 and 53, both noted for active rectal inflammation resembling UC. (Group 2): Nine genes are elevated in most CD and UC affected profiles and most likely contribute towards separation of IBD from normal controls in the MDS plot. These genes include several chemokine ligands produced by activated monocytes and neutrophils, indicative of an immune/inflammation process and seem to correlate well with the inflammation scoring of the samples by histology. (Group 3): Thirteen genes are over expressed in UC primarily and the two UC-like CD cases 33 and 53, roughly distinguishing UC from CD (FIG. 3).

[0319] Significance analyses of microarrays (SAM) to compare affected to normal controls to identify a consistent expression pattern for diseased CD and UC tissues. CD cases confirmed to have active disease by histology were included, CD-45, -48 and -49 with inactive disease and distanced from the other CD cases by MDS were excluded. The CD-unique expression pattern highlights biological processes believed to play major roles in CD pathogenesis (Table 5). These include inflammatory response (IL1B, S100A8), antigen presentation (MHC class II immunoproteasome members PSME2 and PSMB8, MHC class II ATP-binding antigen peptide transporter TAP1, HLA-DMA and UBD of MHC class I), inflammatory cell chemotaxis (IL8, CXCL1, CXCL3), apoptosis (CASP1, CASP10), macrophage activation (ASMT and interferon-regulated genes IFITM1, IFITM3, ISG20, IFI35, SP110), leukocyte protection (LILRB encoding a receptor for class I MHC antigens), and acute phase response (ADM, STAT1, STAT3, and protease inhibitors SERPINA1 and SPINK1 to prevent tissue destruction). Certain overlaps evident between the CD and the UC over expressed gene signatures (Table 2. lower panel), involve immune response, antigen presentation (IGHG4, GIP3, LCN2), complement function (C4BPB, DAF), antimicrobial (DEFA6) and general inflammatory response (NOS2A, S100A9, REG1A, PAP).

TABLE 11
CD Gene Expression Signature

| Gene | Symbol | Biological function | Cytoband |
|---|---|---|---|
| CD unique gene expression* | | | |
| Adrenomedullin** | ADM | Acute phase response | 11p15.4 |
| Serine protease inhibitor, Kazal type 1 | SPINK1 | Acute phase response | 5q32 |
| Serine/cysteine proteinase inhibitor, clade A, 1 | SERPINA1 | Acute phase response | 14q32.1 |
| Signal transducer and activator of | STAT1 | Acute phase response | 2q32.2 |
| transcription 1 | | | |
| Signal transducer and activator of | STAT3 | Acute phase response | 17q21.31 |
| transcription 3** | | | |
| Proteasome activator subunit 2** | PSME2 | Antigen presentation | 14q11.2 |
| Proteasome subunit, beta type, 8** | PSMB8 | Antigen presentation | 6p21.3 |
| Ubiquitin D | UBD | Antigen presentation | 6p21.3 |
| Ubiquitin-conjugating enzyme E2L 6 | UBE2L6 | Antigen presentation | 11q12 |
| Transporter 1, ATP-binding cassette, sub B | TAP1 | Antigen presentation | 6p21.3 |
| Caspase 1 | CASP1 | Apoptosis | 11q23 |
| Caspase 10 | CASP10 | Apoptosis | 2q33-q34 |
| Acetylserotonin O-methyltransferase | ASMT | B-cell activation | Xp22.3/Yp11.3 |
| Mucin 1, transmembrane | MUC1 | Cytoskeleton | 1q21 |
| Myosin, light polypeptide 3 | MYL3 | Cytoskeleton | 3p21.3-p21.2 |
| Chymotrypsin-like | CTRL | Immune response | 16q22.1 |
| Interferon induced transmembrane protein 1 | IFITM1 | Immune response | 11p15.5 |
| Interferon induced transmembrane protein 3 | IFITM3 | Immune response | 11p15.5 |
| Interferon stimulated gene 20 kDa | ISG20 | Immune response | 15q26 |
| Interferon-induced protein 35** | IFI35 | Immune response | 17q21 |
| Interleukin 1, beta | IL1B | Immune response | 2q14 |
| Leukocyte Ig-like receptor, subfamily B, 1 | LILRB1 | Immune response | 19q13.4 |
| MHC, class II, DM alpha | HLA-DMA | Immune response | 6p21.3 |
| SP110 nuclear body protein | SP110 | Immune response | 2q37.1 |
| Chemokine (C—X—C motif) ligand 1** | CXCL1 | Inflammatory cell | 4p21 |
| | | recruitment | |
| Chemokine (C—X—C motif) ligand 3 | CXCL3 | Inflammatory cell | 4q21 |
| | | recruitment | |
| Interleukin 8 | IL8 | Inflammatory cell | 4q13-q21 |
| | | recruitment | |
| Regenerating islet-derived 1 beta | REG1B | Inflammatory cell | 2p12 |
| | | recruitment | |
| S100 calcium binding protein A8 | S100A8 | Inflammatory cell | 1q21 |
| | | recruitment | |
| Lipase, gastric | LIPF | Lipid metabolism | 10q23.31 |
| Ig lambda variable (IV)/OR22-2 | IGLVIVOR22-2 | Unknown | 22q12.2-q12.3 |
| Gene expression common to CD and UC* | | | |
| Ig heavy constant gamma 4 (G4m marker) | IGHG4 | Antigen binding | 14q32.33 |
| Defensin, alpha 6, Paneth cell-specific | DEFA6 | Antimicrobial | 8pter-p21 |
| Complement component 4 binding protein, β | C4BPB | Complement cascade | 1q32 |
| Decay accelerating factor for complement | DAF | Complement regulation | 1q32 |
| Membrane-associated protein 17 | MAP17 | Epithelial cell proliferation | 1p33 |
| Chemokine (C—X—C motif) ligand 2 | CXCL2 | Immune response | 4q21 |
| Deleted in malignant brain tumors 1** | DMBT1 | Immune response | 10q25.3-q26.1 |
| Interferon, alpha-inducible protein | G1P3 | Immune response | 1p35 |
| Lipocalin 2 | LCN2 | Inflammatory response | 9q34 |
| Nitric oxide synthase 2A | NOS2A | Inflammatory response | 17q11.2-q12 |
| Pancreatitis-associated protein | PAP | Inflammatory response | 2p12 |
| Regenerating islet-derived 1 alpha | REG1A | Inflammatory response | 2p12 |
| S100 calcium binding protein A9 | S100A9 | Inflammatory response | 1q21 |
| Protein kinase C, eta | PRKCH | MAPK signaling | 14q22-q23 |
| Regulator of G-protein signalling 3 | RGS3 | MAPK signaling | 9q32 |
| DNA-damage-inducible transcript 4 | DDIT4 | Unknown | 10pter-q26.12 |
| Hypothetical protein FLJ12443 | FLJ12443 | Unknown | 5p15.33 |

*All genes listed here are up regulated compared to normal controls
**Expression confirmed by quantitative RT-PCR

[0320] In the UC signature, derived by comparing all five UC affected to control, up-regulations suggest complement cascade activation (BF and C4A), growth regulatory (MIA) and apoptosis (ATM) changes, detoxification (NNMT) and intracellular transport (SNX26) (Table 12). Down regulations in UC are seen in biosynthetic and metabolic processes (PANK3, HPGD), and in endoplasmic reticulum-, Golgi-transport/intracellular trafficking (F2RL1, GABRG3, GNGT1, SLC4A4).

TABLE 12
UC Gene Expression Signature

| Gene | Symbol | Biological function | Cytoband |
|---|---|---|---|
| Up-regulated | | | |
| Defensin, alpha 5, Paneth cell-specific | DEFA5 | Antimicrobial | 8pter-p21 |
| Ataxia telangiectasia mutated | ATM | Apoptosis | 11q22-q23 |
| Chemokine (C—X—C motif) ligand 13 | CXCL13 | B-cell chemoattractant | 4q21 |
| B-factor, properdin | BF | Complement activation | 6p21.3 |
| Complement component 4A | C4A | Complement activation | 6p21.3 |
| Actin, beta | ACTB | Cytoskeleton | 7p15-p12 |
| Nicotinamide N-methyltransferase | NNMT | Detoxification | 11q23.1 |
| Melanoma inhibitory activity | MIA | Growth regulation | 19q13.32-q13.33 |
| Sorting nexin 26 | SNX26 | Intracellular protein | 19q13.13 |
| | | transport | |
| A disintegrin and metalloproteinase domain 5 | ADAM5 | Unknown | 8p11.23 |
| RNA binding motif protein 8A | RBM8A | Unknown | 1q12 |
| Tribbles homolog 2 (Drosophila) | TRIB2 | Unknown | 2p25.1 |
| Down-regulated | | | |
| Cyclin G1 | CCNG1 | Cell growth | 5q32-q34 |
| Myeloid/lymphoid or mixed-lineage leukemia; translocated to, 3 | MLLT3 | Cell growth | 9p22 |
| Protein phosphatase 2 (formerly 2A), regulatory subunit B″, alpha | PPP2R3A | Cell growth regulation | 3q22.1 |
| Pantothenate kinase 3 | PANK3 | CoA biosynthetic | 5q34 |
| Dynein, axonemal, heavy polypeptide 9 | DNAH9 | Cytoskeleton | 17p12 |
| Guanine nucleotide binding protein, gamma transducing activity polypeptide 1 | GNGT1 | G protein member | 7q21.3 |
| Coagulation factor II (thrombin) receptor-like 1 | F2RL1 | Golgi apparatus protein | 5q13 |
| Surfactant, pulmonary-associated protein D | SFTPD | Innate immune response | 10q22.2-q23.1 |
| Solute carrier family 4, sodium bicarbonate cotransporter, member 4 | SLC4A4 | Ion transport | 4q21 |
| Gamma-aminobutyric acid (GABA) A receptor, gamma 3 | GABRG3 | Ligand-gated ion channel | 15q11-q13 |
| Hydroxyprostaglandin dehydrogenase 15-(NAD) | HPGD | Prostaglandin metabolism | 4q34-q35 |
| TAF5-like RNA polymerase II, p300/CBP-associated factor (PCAF)-associated | TAF5L | Transcription | 1q42.13 |
| factor, 65 kDa | | | |
| Protein kinase, cAMP-dependent, catalytic, beta | PRKACB | Wnt-signaling | 1p36.1 |

[0321] Global gene expression patterns were obtained from single endoscopic pinch biopsies that were reproducible and representative of the local diseased area. Overlap was found between profiles of resected tissues and endoscopic tissues. Both UC patterns are quite dynamic showing multiple gene expression changes (REG1A, LCN2, NOS2, NNMT, for example). In contrast, the signature for resected CD tissues was remarkably static compared to that of biopsies. The CD biopsy tissues show induction of several chemokine and interferon-γ responsive genes.

[0322] Without wishing to be bound by theory, gene expression differences in CD and UC speak of fundamentally different biological processes contributing to their pathogenesis. The genes over-expressed in CD are overwhelmingly those of acute phase and innate immune response (involving IL-1 and TNFα mediated induction of NF-κB), MHC class II mediated antigen presentation, macrophage activation and recruitment of inflammatory cells. The distinctive transmural tissue damage and mesenchymal involvement in CD may be due to this major early involvement of immune and inflammatory cells. Gene expression changes in UC, on the other hand, make a strong case for loss of epithelial homeostasis as being central to UC. Epithelial secretion is a process that is pivotal to maintaining intestinal mucosal integrity.²⁰ Intracellular trafficking and secretory functions of the endoplasmic reticulum (ER) are essential for the degradation and secretion of ingested environmental toxins by the intestinal epithelium. Upon examining the UC signature and the 50 genes whose expression differences coincide with separation of UC from CD in the MDS plot, it was observed that a number of genes functioning in epithelial secretion, intracellular trafficking and endoplasmic reticulum or Golgi functions are remarkably down regulated in UC. An overload of degraded, unfolded proteins has been proposed to cause ER stress as in the Ire1β (Inositol requiring kinase 1)—deficient mouse that develop colitis when challenged with dextran sodium sulfate.²¹ Without wishing to be bound by theory, initial events in CD and UC may be quite different (FIG. 4). In CD it is mostly a deregulation of immune functions as has been believed for a long time, while impaired detoxification and ER stress contribute to UC. Interestingly, ER stress has been recently linked to obesity, insulin resistance and type 2 diabetes.²² In that study metabolic and inflammatory stress (increased lipid synthesis) was suggested to cause increased workload in the ER. In UC down regulation of metabolic and biotransformation enzymes may be the primary cause of ER stress.

[0323] Unsupervised multidimensional scaling was used on the IBD and normal gene expression profiles to develop a systematic approach towards molecular classification²⁴⁻²⁸ of disease subtypes. There is a clear separation of controls from IBD. Within the CD cases there is a grouping of some into one sub group, with two other CD cases localizing with UC samples, underscoring the heterogeneous nature of CD.

[0324] The following genes from the signatures pose promising IBD candidate genes: apoptosis-regulating CASP10 at 2q33-34, LILRB1 at 19q13.4 (locus IBD6) and antigen-presenting genes PSME2 at 14q11.2 (locus IBD4). With respect to the IBD3 locus at 6p21,³⁵ HLA-DMA, TAP1, UBD and PSMB8 (immunoproteasome for generating MHC class I binding antigenic peptides), at 6p21.3, are particularly intriguing. GNGT1 (7q21.3) functioning in apoptosis and PRKACB (1p36.1, IBD7), involved in Wnt-signaling from the UC signature are also good candidates.

### Sample Classification by Multidimensional Scaling

[0325] A total of 18 CD samples (8 affected and 10 unaffected biopsies), 10 UC samples (5 affected and 5 unaffected) and 4 normal biopsy samples were analyzed. The histological assessment of the biopsy samples are presented first to evaluate the MDS classification in the context of their histology. Control and unaffected biopsies essentially display normal colonic architecture, with no evidence of cryptitis, crypt distortion, or acute and chronic inflammation (FIG. 5, A and B). In contrast, biopsies marked as “affected” manifest variable degrees of acute or chronic colitis, including one or more of the following histologic features: cryptitis, with or without accompanying crypt abscesses, crypt distortion, lamina propria fibrosis, crypt dropout, basal lymphoplasmacytosis, and Paneth cell metaplasia (FIG. 5, C and D). None of the biopsies indicate evidence of colitis-associated epithelial dysplasia or neoplasia.

Cross Validation by Quantitative RT-PCR (qRT-PCR)

[0326] Eight genes (CXCL1, DMBT1, ASMT, ADM, STAT3, IFI35, PSME2 and PSMB8) were selected from our microarray expression profiles for further confirmation by quantitative (q) RT-PCR (FIG. 6). The qRT-PCR results show excellent agreement with the array analysis results. CXCL1 and DMBT1 are up regulated in CD and UC affected biopsies, while ADM, STAT3, PSME2 and PSMB8 are primarily up regulated in CD affected biopsies. ASMT and IFI35 show elevated levels of transcript in CD affected and unaffected biopsies (FIG. 6).

TABLE 13

| | | Probe SEQ ID NOS |
|---|---|---|
| | | (respectively, in |
| Sequence | SEQ ID NO | order of appearance) |
| PSME2 | 1 | 2-17 |
| PRKCH | 18 | 19-34 |
| G1P3 | 35 | 36-51 |
| IL8 | 52 | 53-68 |
| IL1B | 69 | 70-85 |
| CCNG1 | 86 | 87-102 |
| NOS2A | 103 | 104-119 |
| ATM | 120 | 121-136 |
| GABRG3 | 137 | 138-153 |
| EST (MAP17) | 154 | 155-170 |
| SFTPD | 171 | 172-187 |
| LCN2 | 188 | 189-204 |
| ISG20 | 205 | 206-221 |
| STAT1 | 222 | 223-238 |
| CXCL3 | 239 | 240-255 |
| DEFA6 | 256 | 257-272 |
| DEFA5 | 273 | 274-289 |
| ADM | 290 | 291-306 |
| TAF5L | 307 | 308-323 |
| LIPF | 324 | 325-340 |
| EST (SNX26) | 341 | 342-357 |
| ASMT | 358 | 359-374 |
| PANK3 | 375 | 376-391 |
| SP110 | 392 | 393-408 |
| BF | 409 | 410-425 |
| SLC4A4 | 426 | 427-442 |
| AMAD5 | 443 | 444-459 |
| LILRB1 | 460 | 461-476 |
| MLLT3 | 477 | 478-493 |
| REG1B | 494 | 495-510 |
| PRKACB | 511 | 512-527 |
| F2RL1 | 528 | 529-544 |
| DNAH9 | 545 | 546-561 |
| GNGT1 | 562 | 563-578 |
| SERPINA1 | 579 | 580-595 |
| NNMT | 596 | 597-612 |
| CXCL2 | 613 | 614-629 |
| EST (HPGD) | 630 | 631-646 |
| HLA-DMA | 647 | 648-663 |
| RGS3 | 664 | 665-680 |
| IGHG1 | 681 | 682-697 |
| C4BPB | 698 | 699-714 |
| SPINK1 | 715 | 716-731 |
| REG1A | 732 | 733-748 |
| MUC1 | 749 | 750-765 |
| EST | 766 | 767-782 |
| MIA | 783 | 784-799 |
| DAF | 800 | 801-816 |
| STAT3 | 817 | 818-833 |
| DDIT4 | 834 | 835-850 |
| PAP | 851 | 852-867 |
| UBD | 868 | 869-884 |
| CASP10 | 885 | 886-901 |
| TAP1 | 902 | 903-918 |
| PSKH1 | 919 | 920-935 |
| UBE2L6 | 936 | 937-952 |
| C4A | 953 | 954-969 |
| RBM8A | 970 | 971-986 |
| CXCL1 | 987 | 988-1003 |
| S100A8 | 1004 | 1005-1020 |
| CXCL13 | 1021 | 1022-1037 |
| EST (FLJ12443) | 1038 | 1039-1054 |
| PSMB8 | 1055 | 1056-1071 |
| DMBT1 | 1072 | 1073-1088 |
| S100A9 | 1089 | 1090-1105 |
| MYL3 | 1106 | 1107-1122 |
| IFITM3 | 1123 | 1124-1139 |
| IFI35 | 1140 | 1141-1156 |
| CASP1 | 1157 | 1158-1173 |
| IFITM1 | 1174 | 1175-1190 |
| TRIB2 | 1191 | 1192-1207 |
| PPP2R3A | 1208 | 1209-1224 |
| ACTB | 1225 | 1226-1245 |

| Accession Number | SEQ ID NO |
|---|---|
| NM_001124.1 | 1246 |
| NM_003122.2 | 1247 |
| NM_000295.3 | 1248 |
| NM_007315.2 | 1249 |
| NM_139276.2 | 1250 |
| NM_002818.2 | 1251 |
| NM_004159.3 | 1252 |
| NM_006398.2 | 1253 |
| NM_004223.3 | 1254 |
| NM_000593.5 | 1255 |
| NM_033292.1 | 1256 |
| NM_032974.2 | 1257 |
| NM_004043.1 | 1258 |
| NM_182741.1 | 1259 |
| NM_000258.1 | 1260 |
| NM_001907.1 | 1261 |
| NM_003641.2 | 1262 |
| NM_021034.1 | 1263 |
| NM_002201.4 | 1264 |
| NM_005533.2 | 1265 |
| NM_000576.2 | 1266 |
| NM_006669.2 | 1267 |
| NM_006120.2 | 1268 |
| NM_080424.1 | 1269 |
| NM_001511.1 | 1270 |
| NM_002090.1 | 1271 |
| NM_000584.2 | 1272 |
| NM_006507.2 | 1273 |
| NM_002964.3 | 1274 |
| NM_004190.1 | 1275 |
| AL021937.1 | 1276 |
| BC025985.1 | 1277 |
| NM_001926.2 | 1278 |
| NM_000716.2 | 1279 |
| NM_000574.2 | 1280 |
| NM_005764.3 | 1281 |
| NM_002089.1 | 1282 |
| NM_007329.1 | 1283 |
| NM_022873.1 | 1284 |
| NM_005564.2 | 1285 |
| NM_000625.3 | 1286 |
| NM_002580.1 | 1287 |
| NM_002909.3 | 1288 |
| NM_002965.2 | 1289 |
| NM_006255.3 | 1290 |
| NM_144488.1 | 1291 |
| NM_019058.1 | 1292 |
| NM_024830.3 | 1293 |
| NM_021010.1 | 1294 |
| NM_000051.2 | 1295 |
| NM_006419.1 | 1296 |
| NM_001710.3 | 1297 |
| NM_007293.1 | 1298 |
| NM_001101.2 | 1299 |
| NM_006169.1 | 1300 |
| NM_006533.1 | 1301 |
| NM_052948.2 | 1302 |
| NR_001448.1 | 1303 |
| NM_005105.2 | 1304 |
| NM_021643.1 | 1305 |
| NM_004060.3 | 1306 |
| NM_004529.1 | 1307 |
| NM_002718.3 | 1308 |
| NM_024594.2 | 1309 |
| NM_001372.2 | 1310 |
| NM_021955.2 | 1311 |
| NM_005242.3 | 1312 |
| NM_003019.3 | 1313 |
| NM_003759.1 | 1314 |
| NM_033223.1 | 1315 |
| NM_000860.3 | 1316 |
| NM_014409.2 | 1317 |
| NM_002731.2 | 1318 |

### REFERENCES

[0327] 1. Fiocchi C. Inflammatory bowel disease: etiology and pathogenesis. Gastroenterology 1998; 115:182-205.
[0328] 2. Podolsky D K. Inflammatory bowel disease. N Engl J Med 2002; 347:417-29.
[0329] 3. Sartor R. Current concepts of the etiology and pathogenesis of ulcerative colitis and Crohn's disease. Gastroenterology Clinics of North America 1995; 24:475-507.
[0330] 4. Blumberg R S, Strober W. Prospects for research in inflammatory bowel disease. Jama 2001; 285:643-7.
[0331] 5. Marion J, Rubin P, Present D. Differential diagnosis of chronic ulcerative colitis and Crohn's disease. W. B. Saunders Company, 2000.
[0332] 6. Sands B E. From symptom to diagnosis: clinical distinctions among various forms of intestinal inflammation. Gastroenterology 2004; 126:1518-32.
[0333] 7. Lawrance I C, Fiocchi C, Chakravarti S. Ulcerative colitis and Crohn's disease: distinctive gene expression profiles and novel susceptibility candidate genes. Hum Mol Genet 2001; 10:445-56.
[0334] 8. Dooley T P, Curto E V, Reddy S P, Davis R L, Lambert G W, Wilborn T W, Elson C O. Regulation of gene expression in inflammatory bowel disease and correlation with IBD drugs: screening by DNA microarrays. Inflamm Bowel Dis 2004; 10:1-14.
[0335] 9. Uthoff S M, Eichenberger M R, Lewis R K, Fox M P, Hamilton C J, McAuliffe T L, Grimes H L, Galandiuk S. Identification of candidate genes in ulcerative colitis and Crohn's disease using cDNA array technology. Int J Oncol 2001; 19:803-10.
[0336] 10. Dieckgraefe B, Stenson W, JR Korzenik, Swanson P, Harrington C. Analysis of mucosal gene expression in inflammatory bowel disease by parallel oligonucleotide arrays. Physiol Genomics 2000; 4:1-11.
[0337] 11. Langmann T, Moehle C, Mauerer R, Scharl M, Liebisch G, Zahn A, Stremmel W, Schmitz G. Loss of detoxification in inflammatory bowel disease: dysregulation of pregnane X receptor target genes. Gastroenterology 2004; 127:26-40.
[0338] 12. Bayless T M, Tokayer A Z, Polito J M, 2nd, Quaskey S A, Mellits E D, Harris M L. Crohn's disease: concordance for site and clinical type in affected family members—potential hereditary influences. Gastroenterology 1996; 111:573-9.
[0339] 13. Podolsky D K. Inflammatory bowel disease (1). N Engl J Med 1991; 325:928-37.
[0340] 14. Picco M F, Bayless T M. Prognostic consideration in idiopathic inflammatory bowel disease. In: Kirsner J B, ed. Inflammatory Bowel Disease. 5th ed. Philadelphia: WB Saunders, 2000:765-780.
[0341] 15. Hommes D W, van Deventer S J. Endoscopy in inflammatory bowel diseases. Gastroenterology 2004; 126:1561-73.
[0342] 16. Colombel J-F, Grandbastien B, Gower-Rousseau C, Plegat S, Evrard J-P, Dupas J-L, Gendre J-P, Modigliani R, Belaiche J, Hostein J, Hugot J-P, VanKruiningen H, Cortot A. Clinical characteristics of Crohn's disease in 72 families. Gastroenterology 1996; 111:604-607.
[0343] 17. Li C, Wong W H. Model-based analysis of oligonucleotide arrays: expression index computation and outlier detection. Proc Natl Acad Sci USA 2001; 98:31-6.
[0344] 18. Tusher V G, Tibshirani R, Chu G. Significance analysis of microarrays applied to the ionizing radiation response. Proc Natl Acad Sci USA 2001; 98:5116-21.
[0345] 19. Torgerson W S. Theory and Methods of Scaling. Wiley, 1958.
[0346] 20. Chang E B. Intestinal Epithelial Function and Response to Mucosal Injury in Inflammatory Bowel Disease. In: Kirsner J B, ed. Inflammatory Bowel Disease. 5th ed. Philadelphia: WB Saunders, 2000:3-19.
[0347] 21. Bertolotti A, Wang X, Novoa I, Jungreis R, Schlessinger K, Cho J H, West A B, Ron D. Increased sensitivity to dextran sodium sulfate colitis in IRE1beta-deficient mice. J Clin Invest 2001; 107:585-93.
[0348] 22. Ozcan U, Cao Q, Yilmaz E, Lee A H, Iwakoshi N N, Ozdelen E, Tuncman G, Gorgun C, Glimcher L H, Hotamisligil G S. Endoplasmic reticulum stress links obesity, insulin action, and type 2 diabetes. Science 2004; 306:457-61.
[0349] 23. Panwala C M, Jones J C, Viney J L. A novel model of inflammatory bowel disease: mice deficient for the multiple drug resistance gene, mdr1a, spontaneously develop colitis. J Immunol 1998; 161:5733-44.
[0350] 24. Golub T, Slonim D, Tamayo P, Huard C, Gaasenbeek M, Mesirov J, Coller H, Loh M, Downing J, Caligiuri M, Bloomfield C, Lander E. Molecular classification of cancer: class discovery and class prediction by gene expression monitoring. Science 1999; 286:531-7.
[0351] 25. Yeoh E J, Ross M E, Shurtleff S A, Williams W K, Patel D, Mahfouz R, Behm F G, Raimondi S C, Relling M V, Patel A, Cheng C, Campana D, Wilkins D, Zhou X, Li J, Liu H, Pui C H, Evans W E, Naeve C, Wong L, Downing J R. Classification, subtype discovery, and prediction of outcome in pediatric acute lymphoblastic leukemia by gene expression profiling. Cancer Cell 2002; 1:133-43.
[0352] 26. Bittner M, Meltzer P, Chen Y, Jiang Y, Seftor E, Hendrix M, Radmacher M, Simon R, Yakhini Z, Ben-Dor A, Sampas N, Dougherty E, Wang E, Marincola F, Gooden C, Lueders J, Glatfelter A, Pollock P, Carpten J, Gillanders E, Leja D, Dietrich K, Beaudry C, Berens M, Alberts D, Sondak V. Molecular classification of cutaneous malignant melanoma by gene expression profiling. Nature 2000; 406:536-40.
[0353] 27. Hedenfalk I, Duggan D, Chen Y, Radmacher M, Bittner M, Simon R, Meltzer P, Gusterson B, Esteller M, Kallioniemi O P, Wilfond B, Borg A, Trent J. Gene-expression profiles in hereditary breast cancer. N Engl J Med 2001; 344:539-48.
[0354] 28. Fuller G N, Hess K R, Rhee C H, Yung W K, Sawaya R A, Bruner J M, Zhang W. Molecular classification of human diffuse gliomas by multidimensional scaling analysis of gene expression profiles parallels morphology-based classification, correlates with survival, and reveals clinically-relevant novel glioma subsets. Brain Pathol 2002; 12:108-16.
[0355] 29. Vasiliauskas E A, Kam L Y, Karp L C, Gaiennie J, Yang H, Targan S R. Marker antibody expression stratifies Crohn's disease into immunologically homogeneous subgroups with distinct clinical characteristics. Gut 2000; 47:487-96.
[0356] 30. Morley M, Molony C M, Weber T M, Devlin J L, Ewens K G, Spielman R S, Cheung V G. Genetic analysis of genome-wide variation in human gene expression. Nature 2004; 430:743-7.
[0357] 31. Satsangi J, Parkes M, Louis E, Hashimoto L, Kato N, Welsh K, Terwilliger J, Lathrop G, Bell J, Jewell D. Two stage genome-wide search in inflammatory bowel disease provides evidence for susceptibility loci on chromosome 3, 7 and 12. Nature Genet 1996; 14:199-202.
[0358] 32. Hugot J P, Thomas G. Genome-wide scanning in inflammatory bowel diseases. Dig Dis 1998; 16:364-9.
[0359] 33. Brant S R, Shugart Y Y. Inflammatory bowel disease gene hunting by linkage analysis: rationale, methodology, and present status of the field. Inflamm Bowel Dis 2004; 10:300-11.
[0360] 34. Cho J, Nicolae D, Gold L, Fields C, LaBuda M, Rohal P, Pickles M, Qin L, Fu Y, Mann J, Kirschner B, Jabs E, Weber J, Hanauer S, Bayless T, Brant S. Identification of novel susceptibility loci for inflammatory bowel disease on chromosomes 1p, 3q, and 4q: evidence for epistasis between 1p and IBD1. Proc Natl Acad Sci USA 1998; 95:7502-7.
[0361] 35. Hampe J, Schreiber S, Shaw S H, Lau K F, Bridger S, Macpherson A J, Cardon L R, Sakul H, Harris T J, Buckler A, Hall J, Stokkers P, van Deventer S J, Nurnberg P, Mirza M M, Lee J C, Lennard-Jones J E, Mathew C G, Curran M E. A genomewide analysis provides evidence for novel linkages in inflammatory bowel disease in a large European cohort.PG-808-16. Am J Hum Genet 1999; 64:808-16.

### Example 2

[0362] Expressions of genes (PSME2, PSMB8, ADM, STAT3, CXCL1, DMBT1 and GAPDH) were quantified by real-time RT-PCR using QuantiTect SYBR Green PCR Kit (Qiagen Inc., Valencia, USA) according to manufacturer's instruction. The specific primers for genes selected are available online (supplementary Table 14). The relative expression value is defined as 2^{ΔC}^{_{T}}, where ΔC_{T}=(C_{T} of GAPDH−C_{T} of gene X)−(C_{T} of GAPDH no template control−C_{T} of gene X no template control).

TABLE 14
Primer for quantitative real-time RT-PCR

| Gene | | |
|---|---|---|
| symbol | Forward (5′→3′) | Reverse (5′→3′) |
| GAPDH | GTCTCCTCTGACTTCAACA | CAGGAAATGAGCTTGACAAA |
| PSME2 | ACCTGATCCCCAAGATTGAA | TGGAAATGGTTGTCTGGAAAG |
| PSMB8 | TAAGTCCAAGGAGAAGAAGAG | CAAATAGAGAACACGCAGAAGA |
| ADM | CAGCGAGGTGTAAAGTTG | GACTCGGTGTTTCCTTCTTC |
| DMBT1 | TGCTGTACTGACCTTGTTTG | GGGTCCGTAGGTGTCATC |
| CXCL1 | CCAAAGTGTGAACGTGAAG | TGGGGGATGCAGGATTGA |
| SATA3 | TTTTACCAAGCCCCCAAT | TGCTCGATGCTCAGTCCT |

### Immunohistochemistry

[0363] Immunohistochemistry was performed on paraffin-embedded sections of colonoscopic biopsies from 2 CD, 3 UC patients and 2 healthy controls (demographics included in supplementary Table 15). An ABC-staining kit with the rabbit anti-human TAP1 antibody (1 ug/ml) was used as described by the manufacturer (Santa Cruz Biotechnology, Santa Cruz, USA). The slides were counter-stained with Hematoxylin Gill No. 2 (Sigma).

TABLE 15
Demographics

| | | | Disease | | | | | | |
|---|---|---|---|---|---|---|---|---|---|
| | Age | | | Duration | Endoscopy | | Histology | | |
| Sample* | (years) | Sex | Location | (years) | Site | definition | Inflammation# | Fibrosis## | Medication** |
| CD138 | 40 | M | Ileocolonic | 17 | Sigmoid | Unaffected | +/− | − | 1, 3, 4 |
| CD141 | 45 | F | colonic | 13 | Splenic | Affected | ++ | − | 1, 3 |
| | | | | | flexure | | | | |
| Mean | 42.5 | | | | | | | | |
| UC133 | 52 | M | Pancolitis | 29 | Sigmoid | Unaffected | − | − | 1 |
| UC134 | 30 | F | Pancolitis | 21 | Sigmoid | Affected | ++ | − | 1, 2, 3, 4 |
| UC135 | 33 | F | Distal | 2 | Sigmoid | Unaffected | +/− | − | 1 |
| Mean | 38.3 | | | | | | | | |
| N145 | 56 | M | | | Sigmoid | normal | − | − | |
| N66 | 57 | F | | | Sigmoid | normal | − | − | |
| Mean | 56.5 | | | | | | | | |

*CD: Crohn's disease, UC: ulcerative colitis, N: healthy control.
#Score (−, +, ++, +++) based on active (polymorphonuclear) and chronic (lymphoplasmacytic) inflammation.
##Fibrosis score based on extent of lamina propria involvement, splaying of the muscularis mucosa, and crypt dropout.
**1 = 5ASA, 2 = antibiotics, 3 = steroids, 4 = immunomodulations: Azathioprine, 6MP, or Infliximab.

### Sample Classification by Multidimensional Scaling (MDS)

[0364] To explore the potential of classifying IBD types, based on gene expression patterns, we applied the unsupervised, no pre-defined groups, MDS clustering method on the entire microarray data set. An analysis of 36 samples by MDS indicated a clear distinction between sample-types (FIG. 7). First, all “affected” samples bearing inflammation appear in quadrants Q1 and Q4 (FIG. 7A. solid symbols), and separate clearly from unaffected and healthy control samples which appear in Q2 and Q3 (FIG. 7A. open symbols). When the following variables were plotted to the MDS map, we found that the distribution of samples in the MDS map is independent of the these variables: the sites from where biopsies were taken, patients' age, gender, disease duration, medication and fibrosis score of biopsy. Second, the majority of the CD cases appear together in Q1. Clinically these CD cases were characterized by rectal sparing. Two UC affected (UC-32 and UC-71) cases appearing in Q1, were diagnosed with pancolitis. On the other hand, three UC affected cases appear in Q4. Two CD cases (CD-33 and CD-53), with rectal disease and high histopathologic inflammation scores, co-localized with the UC affected in Q4, possibly representing a CD subgroup resembling UC. Finally, acute bacterial infectious colitis (INF156 and INF157) can be distinguished from IBD and diverticulitis in a second representation of the MDS map (FIG. 7B, MDS component 3 versus 2).

### Genes Differentially Expressed in CD and UC Affected Tissues

[0365] Significance Analyses of Microarrays (SAM) was used to identify genes that demonstrated consistent change in expression in affected CD and UC tissues versus healthy control (Table 16).

TABLE 16
Genes over-expressed in CD or UC affected tissues as compared with healthy
controls

| | Symbol | Biological implication | Cytoband |
|---|---|---|---|
| CD | | | |
| Adrenomedullin | ADM | Acute-phase response | 11p15.4 |
| Serum amyloid A1 | SAA1 | Acute-phase response | 11p15.1 |
| Serine/cysteine proteinase inhibitor, | SERPINA1 | Acute-phase response | 14q32.1 |
| clade A, 1 | | | |
| Signal transducer and activator of | STAT1 | Acute-phase response | 2q32.2 |
| transcription 1 | | | |
| Signal transducer and activator of | STAT3 | Acute-phase response | 17q21.31 |
| transcription 3 | | | |
| Leukocyte Ig-like receptor, subfamily | LILRB1 | Antigen binding | 19q13.4 |
| B, member 1 | | | |
| MHC, class II, DR beta 5 | HLA-DRB5 | Antigen presentation | 6p21.3 |
| Transporter 1, ATP-binding cassette, | TAP1 | Antigen processing | 6p21.3 |
| sub-family B | | | |
| Proteasome activator subunit 2 (PA28 | PSME2 | Antigen processing | 14q11.2 |
| beta) | | | |
| Proteasome subunit, beta type, 8 | PSMB8 | Antigen processing | 6p21.3 |
| Proteasome subunit, beta type, 9 | PSMB9 | Immune response | 6p21.3 |
| Proteasome subunit, beta type, 10 | PSMB10 | Immune response | 16q22.1 |
| Interferon, alpha-inducible protein | G1P3 | Immune response | 1p35 |
| (clone IFI-6-16) | | | |
| Interferon induced transmembrane | IFITM1 | Immune response | 11p15.5 |
| protein 1 (9-27) | | | |
| Interferon induced transmembrane | IFITM3 | Immune response | 11p15.5 |
| protein 3 (1-8U) | | | |
| Interferon stimulated gene 20 kDa | ISG20 | Macrophage activation | 15q26 |
| Caspase 10 | CASP10 | Apoptosis | 2q33-q34 |
| Mucin 4, tracheobronchial | MUC4 | Cell adhesion | 3q29 |
| Regenerating islet-derived 1 beta | REG1B | Cell proliferation | 2p12 |
| Mucin 1, transmembrane | MUC1 | Cytoskeleton | 1q21 |
| Serine protease inhibitor, Kazal type 4 | SPINK4 | Endopeptidase inhibitor | 9p13.3 |
| Lipin 1 | LPIN1 | Adipocyte differentiation | 2p25.1 |
| UC | | | |
| Coronin, actin binding protein, 1A | CORO1A | Cell migration | 16p11.2 |
| Matrix metalloproteinase 12 | MMP12 | Cell migration | 11q22.3 |
| Platelet/endothelial cell adhesion | PECAM1 | Cell migration | 17q23 |
| molecule (CD31) | | | |
| Talin 1 | TLN1 | Cell migration | 9p13 |
| Tissue inhibitor of metalloproteinase 1 | TIMP1 | Cell migration | Xp11.3-p11.23 |
| Interferon, gamma-inducible protein 30 | IFI30 | Immune response | 19p13.1 |
| POU domain, class 2, associating | POU2AF1 | Immune response, humoral | 11q23.1 |
| factor 1 | | | |
| Clusterin (complement lysis inhibitor, | CLU | Immune response/apoptosis | 8p21-p12 |
| SP-40,40) | | | |
| TNF receptor superfamily, member 7 | TNFRSF7 | Immune response/apoptosis | 12p13 |
| Prostaglandin D2 synthase | PTGDS | Inflammatory response | 9q34.2-q34.3 |
| CD79A antigen (Ig-associated alpha) | CD79A | Defense response | 19q13.2 |
| Defensin, alpha 5, Paneth cell-specific | DEFA5 | Antimicrobial response | 8pter-p21 |
| Ubiquitin D | UBD | Antimicrobial response | 6p21.3 |
| Chemokine (C-C motif) ligand 11 | CCL11 | Chemotaxis, eosinophil | 17q21.1-q21.2 |
| Insulin-like growth factor binding | IGFBP5 | Regulation of cell growth | 2q33-q36 |
| protein 5 | | | |
| Endothelial cell growth factor 1 | ECGF1 | Angiogenesis | 22q13 |
| (platelet-derived) | | | |
| Fascin homolog 1, actin-bundling | FSCN1 | Cell proliferation | 7p22 |
| protein | | | |
| Ataxia telangiectasia mutated | ATM | Apoptosis | 11q22-q23 |
| Notch homolog 3 (Drosophila) | NOTCH3 | Notch signaling | 19p13.2-p13.1 |
| Protease inhibitor 3, skin-derived | PI3 | Endopeptidase inhibitor | 20q12-q13 |
| (SKALP) | | | |
| Nucleoporin 210 | NIP210 | Development | 3p25.2-p25.1 |
| AT rich interactive domain 5A (MRF1- | ARID5A | DNA binding | 2q11.2 |
| like) | | | |
| Pyruvate dehydrogenase kinase, | PDK3 | Protein phosphorylation | Xp22.11 |
| isoenzyme 3 | | | |
| Cathepsin H | CTSH | Proteolysis | 15q24-q25 |
| Lymphocyte cytosolic protein 1 (L- | LCP1 | Unknown | 13q14.3 |
| plastin) | | | |
| Stomatin | STOM | Unknown | 9q34.1 |

[0366] Six CD affected cases were compared to healthy controls, while CD-45, -48 and -59 with biopsies demonstrating only inactive disease were excluded from this analysis. The CD expression pattern highlights biological processes believed to play major roles in CD pathogenesis. Proteins encoded by these 22 genes regulate antigen processing/presentation, macrophage activation and acute phase response (Table 16). A list of 12 genes down regulated in CD affected biopsies is presented in supplementary Table 17.

TABLE 17
Genes down-regulated in CD or UC as compared with healthy controls

| | Symbol | Biological implication | Cytoband |
|---|---|---|---|
| CD | | | |
| Down syndrome critical region gene 1-like 1 | DSCR1L1 | Calcium-mediated signaling | 6p21.1-p12.3 |
| Spondin 1, extracellular matrix protein | SPON1 | Cell adhesion | 11p15.2 |
| Thrombospondin 1 | THBS1 | Cell motility | 15q15 |
| Chemokine (C—X—C motif) ligand 12 | CXCL12 | Chemotaxis | 10q11.1 |
| Stathmin-like 2 | STMN2 | Neuron cell differentiation | 8q21.13 |
| Serine/cysteine proteinase inhibitor, clade B, 7 | SERPINB7 | Proteinase inhibitor | 18q21.33 |
| WEE1 homolog (S. pombe) | WEE1 | Regulation of cell cycle | 11p15.3-p15.1 |
| Myosin, heavy polypeptide 11, smooth muscle | MYH11 | Striated muscle contraction | 16p13.13-p13.12 |
| Chromosome 14 ORF116 (checkpoint | CHES1 | Transcription regulation | 14q24.3-q32.11 |
| suppressor 1) | | | |
| Pre-B-cell leukemia transcription factor 3 | PBX3 | Transcription regulation | 9q33-q34 |
| Autism susceptibility candidate 2 | AUTS2 | Unknown | 7q11.22 |
| Poliovirus receptor-related 3 | PVRL3 | Unknown | 3q13 |
| UC | | | |
| Semaphorin 6A-1 | SEMA6A | Apoptosis | 5q23.1 |
| KIAA0931 protein (PH domain and leucine rich | PHLPPL | Biosynthesis, cAMP | 16q22.2 |
| Repeat protein phosphatase-like) | | | |
| Mitochondrial ribosomal protein S6 | MRPS6 | Biosynthesis, protein | 21q21.3-q22.1 |
| Sterol-C5-desaturase (ERG3 delta-5-desaturase | SC5DL | Biosynthesis, steroid | 11q23.3 |
| Homolog, fungal)-like | | | |
| Related RAS viral (r-ras) oncogene homolog 2 | SCP2 | Biosynthesis, steroid | 11p15.2 |
| UDP-glucose dehydrogenase | UGDH | Biosynthesis, UDP-glucuronate | 4p15.1 |
| Calpastatin | CAST | calpain inhibitor activity | 5q15-q21 |
| ADAM-like, decysin 1 | ADAMDEC1 | cell adhesion inhibition | 8p21.2 |
| Dynein, axonemal, heavy polypeptide 9 | DNAH9 | cell motility | 17p12 |
| Ephrin-A1 | EFNA1 | cell-cell signaling | 1q21-q22 |
| Fibroblast growth factor receptor 3 | FGFR3 | MAPKKK/JAK-STAT cascade | 4p16.3 |
| Methylmalonyl Coenzyme A mutase | MUT | Metabolism | 6p21 |
| Phosphoenolpyruvate carboxykinase 1 (soluble) | PCK1 | Metabolism, gluconeogenesis | 20q13.31 |
| Gamma-glutamyl hydrolase | GGH | Metabolism, glutamine | 8q12.3 |
| N-acylsphingosine amidohydrolase-like | ASAHL | Metabolism, hydrolase activity | 4q21.1 |
| Acyl-Coenzyme A dehydrogenase, C-4 to C-12 | ACADM | Metabolism, lipid | 1p31 |
| straight chain | | | |
| UDP glycosyltransferase 2 family, B28 | UGT2B28 | Metabolism, lipid | 4q13 |
| Ectonucleoside triphosphate | ENTPD5 | Metabolism, neucleotide | 14q24 |
| diphosphohydrolase 5 | | | |
| Ectonucleotide | ENPP4 | Metabolism, nucleotide | 6p21.1 |
| pyrophosphatase/phosphodiesterase 4 | | | |
| Cisplatin resistance associated | MTMR11 | Metabolism, phospholipid | 1q12-q21 |
| aAcyl-Coenzyme A oxidase 1, palmitoyl | ACOX1 | Metabolism, prostaglandin | 17q24-q25 |
| Neural precursor cell expressed, | NEDD4L | Metabolism, ubiquitin-protein/ | 18q21 |
| developmentally down-regulated 4-like | | sodium transport | |
| Tetraspanin 7 (transmembrane 4 superfamily, 2) | TSPAN7 | N-linked glycosylation | Xp11.4 |
| Protein tyrosine phosphatase, receptor type, R | PTPRR | Protein dephosphorylation | 12q15 |
| Vacuolar protein sorting 13A (yeast) | VPS13A | Protein localization | 9q21 |
| Procollagen-lysine, 2-oxoglutarate 5- | PLOD2 | Protein modification | 3q23-q24 |
| dioxygenase 2 | | | |
| Dual-specificity tyrosine-(Y)-phosphorylation | DYRK2 | Protein phosphorylation | 12q15 |
| regulated kinase 2 | | | |
| Guanylate cyclase activator 2A (guanylin) | GUCA2A | Regulation of smooth muscle | 1p35-p34 |
| | | contraction | |
| Guanylate cyclase activator 2B (uroguanylin) | GUCA2B | Regulation of smooth muscle | 1p34-p13 |
| | | contraction | |
| Sorcin | SRI | Regulation of striated muscle | 7q21.1 |
| | | contraction | |
| Endothelin 3 | EDN3 | Regulation of vasoconstriction | 20q13.2-q13.3 |
| Peroxiredoxin 6 | PRDX6 | Response to oxidative stress | 1q25.1 |
| Selenium binding protein 1 | SELENBP1 | Selenium binding | 1q21-q22 |
| A kinase (PRKA) anchor protein (yotiao) 9 | AKAP9 | Signal transduction | 7q21-q22 |
| Phosphoinositide-3-kinase, regulatory subunit, | PIK3R1 | Signal transduction | 5q13.1 |
| polypeptide 1 (p85 alpha) | | | |
| Coagulation factor II (thrombin) receptor-like 1 | F2RL1 | Signal transduction/blood | 5q13 |
| | | coagulation | |
| Lectin, galactoside-binding, soluble, 2 (galectin | LGALS2 | Sugar binding | 22q13.1 |
| 2) | | | |
| Chromodomain helicase DNA binding protein 1 | CHD1 | Transcription regulation | 5q15-q21 |
| Hepatocyte nuclear factor 4, gamma | HNF4G | Transcription regulation | 8q21.11 |
| Myeloid/lymphoid or mixed-lineage leukemia | MLLT2 | Transcription regulation | 4q21 |
| (trithorax homolog, Drosophila); translocated | | | |
| to, 2 | | | |
| v-myb myeloblastosis viral oncogene homolog | MYB | Transcription regulation | 6q22-q23 |
| (avian) | | | |
| Nuclear receptor subfamily 3, group C, member 2 | NR3C2 | Transcription regulation | 4q31.1 |
| SATB family member 2 | SATB2 | Transcription regulation | 2q33 |
| Zinc finger protein 217 | ZNF217 | Transcription regulation | 20q13.2 |
| Cyclin T2 | CCNT2 | Transcription regulation | 2q21.3 |
| Kruppel-like factor 5 (intestinal) | KLF5 | Transcription regulation | 13q22.1 |
| ATPase, Ca++ transporting, plasma membrane 1 | ATP2B1 | Transport, calcium | 12q21.3 |
| Exophilin 5 | EXPH5 | Transport, protein | 11q22.3 |
| Solute carrier family 16, member 1 | SLC16A1 | Transport, organic anion | 1p12 |
| Secretory carrier membrane protein 1 | SCAMP1 | Transport, protein | 5q13.3-q14.1 |
| Transportin 1 | TNPO1 | Transport, protein | 5q13.2 |
| Solute carrier family 26, member 2 | SLC26A2 | Transport, sulfate | 5q31-q34 |
| Aquaporin 8 | AQP8 | Transport, water | 16p12 |
| Peptidyl arginine deiminase, type II | — | Unknown | 1p35.2-p35.1 |
| Cordon-bleu homolog (mouse) | COBL | Unknown | 7p12.1 |
| Family with sequence similarity 8, member A1 | FAM8A1 | Unknown | 6p22-p23 |
| Hypothetical protein FLJ13910 | FLJ13910 | Unknown | 2p11.2 |
| GRP1-binding protein GRSP1(FERM domain | FRMD4B | Unknown | 3p14.1 |
| containing 4B) | | | |
| Histone 1, H4c | HIST1H4C | Unknown | 6p21.3 |
| Hepatocellular carcinoma antigen gene 520 | LOC63928 | Unknown | 16p12.1 |
| Hypothetical protein LOC92482 | LOC92482 | Unknown | 10q24 |
| FLJ11220 (round spermatid basic protein 1) | RSBN1 | Unknown | 1p13.2 |

[0367] In the UC signature, derived by comparing all five UC affected to healthy controls, up-regulation of 26 genes suggests cell migration, growth regulatory and immune response changes as major pathogenic events (Table 16). Down regulations of 62 genes (supplementary Table 17) in UC include 16 genes encoding proteins that regulate biosynthetic and metabolic processes (UGDH, PCK1, GGH and others), 9 transcription regulation genes (CCNT2, CHD1, HNF4G, KLF5, MLLT2, MYB, NR3C2, SATB2, ZNF217), and 7 transporter genes (AQP8, EXPH5, SCAMP1, TNPO1, ATP2B1, SLC16A1, SLC26A2).

[0368] Overall, 25 genes were found to be up-regulated in both CD and UC, while 18 were down-regulated in both (Table 18). These genes are implicated in immune response (including antigen presentation, chemotaxis), general inflammatory response and cell proliferation or apoptosis. These may reflect inflammatory processes that are common to both disease types.

TABLE 18
Gene expression changes in CD and UC as compared with healthy controls

| | | Biological | |
|---|---|---|---|
| | Symbol | implication | Cytoband |
| Up-regulated | | | |
| Ig heavy constant gamma 4 (G4m marker) | IGHG4 | Antigen binding | 14q32.33 |
| MHC, class II, DM alpha | HLA-DMA | Antigen presentation | 6p21.3 |
| MHC, class II, DR beta 1 | HLA-DRB1 | Antigen presentation | 6p21.3 |
| Defensin, alpha 6, Paneth cell-specific | DEFA6 | Antimicrobial | 8pter-p21 |
| Chemokine (C—X—C motif) ligand 1 | CXCL1 | Chemotaxis | 4q21 |
| Chemokine (C—X—C motif) ligand 2 | CXCL2 | Chemotaxis | 4q21 |
| Chemokine (C—X—C motif) ligand 3 | CXCL3 | Chemotaxis | 4q21 |
| Interleukin 8 | IL8 | Chemotaxis | 4q13-q21 |
| B-factor, properdin | BF | Immune response | 6p21.3 |
| Decay accelerating factor for complement | DAF | Immune response | 1q32 |
| Deleted in malignant brain tumors 1 | DMBT1 | Immune response | 10q25.3-q26.1 |
| Lipocalin 2 (oncogene 24p13) | LCN2 | Acute-phase response | 9q34 |
| Nitric oxide synthase 2A (inducible, hepatocytes) | NOS2A | Inflammatory response | 17q11.2-q12 |
| Regenerating islet-derived 3 alpha | REG3A | Inflammatory response | 2p12 |
| S100 calcium binding protein A9 (MRP14) | S100A9 | Inflammatory response | 1q21 |
| Caspase 1 | CASP1 | Apoptosis | 11q23 |
| Peptidylprolyl isomerase D | PPID | Apoptosis | 4q31.1 |
| Pim-2 oncogene | PIM2 | Cell proliferation | Xp11.23 |
| Regenerating islet-derived 1 alpha | REG1A | Cell proliferation | 2p12 |
| Tryptophanyl-tRNA synthetase | WARS | Cell proliferation | 14q32.31 |
| | | inhibition | |
| Regulator of G-protein signalling 3 | RGS3 | Inactivation of MAPK | 9q32 |
| Hypothetical protein FLJ12443 | FLJ12443 | Muscle development | 5p15.33 |
| Protein serine kinase H1 | PSKH1 | Protein phosphorylation | 16q22.1 |
| Ubiquitin-conjugating enzyme E2L 6 | UBE2L6 | Ubiquitin cycle | 11q12 |
| PDZK1 interacting protein 1 | PDZK1IP1 | Unknown | 1p33 |
| Down-regulated | | | |
| Adducin 3 (gamma) | ADD3 | Calmodulin binding | 10q24.2-q24.3 |
| Claudin 8 | CLDN8 | Cell-cell adhesion | 21q22.11 |
| Protein kinase C, iota | PRKCI | Cell polarity | 3q26.3 |
| | | maintenance | |
| UDP glycosyltransferase 8 | UGT8 | Nervous development | 4q26 |
| BTB (POZ) domain containing 3 | BTBD3 | Protein binding | 20p12.2 |
| Protein kinase C-like 2 | PKN2 | Protein phosphorylation | 1p22.2 |
| Protein kinase, cAMP-dependent, catalytic, beta | PRKACB | Protein phosphorylation | 1p36.1 |
| ATP-binding cassette, sub-family B (MDR/TAP), 1 | ABCB1 | Transporter | 7q21.1 |
| Solute carrier family 4, member 4 | SLC4A4 | Transport, anion | 4q21 |
| MAX interactor 1 | MXI1 | Transcription regulation | 10q24-q25 |
| Sp3 transcription factor | SP3 | Transcription regulation | 2q31 |
| Frizzled-related protein | FRZB | Wnt receptor signaling | 2qter |
| Fk506-Binding Protein, Alt. Splice 2 | — | Unknown | — |
| mRNA; cDNA DKFZp586B211 | — | Unknown | — |
| Chromosome 14 open reading frame 11 | C14orf11 | Unknown | 14q13.1 |
| Creatine kinase, brain | CKB | Unknown | 14q132 |
| Transcribed sequences | KIAA1651 | Unknown | — |
| Putative MAPK activating protein | TIPRL | Unknown | 1q23.2 |

[0369] To confirm our microarray data, real-time RT-PCR was used to quantify the expression of genes including immunoproteasome subunit PSME2 and PSMB8, Adrenomedullin (ADM) and Signal transducer and activator of transcription 3 (STAT3) from Table 16, and Chemokine (C-X-C motif) ligand 1 (CXCL1) and Deleted in malignant brain tumors 1 (DMBT1) from Table 18. The mean expressions of PSME2, PSMB8, ADM and STAT3 were increased in CD affected biopsies, while CXCL1 and DMBT1 were incresded in both CD and UC affected compared to healthy control (FIG. 8). The results were corroborated the microarray data. In addition, expression of TAP1 (Transporter 1, ATP-binding cassette, sub-family B) protein was detected by immunohistochemistry on colon sections. The results demonstrated there were more TAP1-positive cells in the IBD samples than the healthy control, and immunopositive cells were more frequent in CD than UC (supplemental FIG. 13). TAP1 protein is expressed predominantly in intestinal macrophages (FIG. 13 B, arrows), and some crypt epithelial cells in the CD and UC affected biopsy tissues (FIGS. 13 B and D, arrowheads).

### Differences in Gene Expression Between IBD and Acute Bacterial Colitis

[0370] The IBD gene expression patterns were compared with bacterial infectious colitis, as another non-IBD inflammatory disease type, to identify gene expression changes in IBD that may reflect disease-related events. Genes were sought that displayed differential expression between the CD or UC affected samples and bacterial colitis, but were unchanged when comparing bacterial colitis to healthy control. 12 such genes were found to be up-regulated in CD affected samples, as compared to bacterial colitis (FIG. 9A), and 8 genes that are over-expressed in UC affected compared to bacterial colitis and healthy control (FIG. 9B). Except fibroblast growth factor receptor 1 (FGFR1) and Chemokine (C-C motif) ligand 11 (CCL11), the majority of the genes identified here are novel findings in terms of differential expression in IBD. These genes may be useful in discriminating IBD from bacterial infection-related temporary colitis.

### Genes Differentially Expressed in Histologically Unaffected IBD Biopsies Compared to Healthy Control

[0371] Alterations in gene expression in histologically unaffected IBD biopsies may indicate early pathogenic events before the onset of secondary inflammation. To test this hypothesis, we included colonic biopsies without histological evidence for inflammation (unaffected) from 9 CD and 4 UC patients in this study. A CD case (CD-48) with disease limited to the ileum was included as a true “unaffected” control. At this time, the SAM analysis detected no significant difference in gene expression profiles between the nine CD and the four UC unaffected samples, based on a highly stringent criteria of: False Discovery Rate ≦0.00001%, fold change >2, and Log₂ mean expression index >6.64. We expect that, as sample size increase, distinctive expression patterns between CD and UC unaffected biopsies may be identified. Upon comparing all 13 profiles of CD and UC unaffected samples to the 4 healthy controls, we found that two genes were up regulated and 42 were down regulated in IBD unaffected samples (FIG. 10). The two up-regulated genes, PSKH1 (protein serine kinase H1) and PPID (peptidylprolyl isomerase D), were also up regulated in the affected biopsy tissues of CD and UC patients. Moreover, about half of the genes down-regulated in the unaffected IBD biopsies were also down regulated in IBD affected tissues (Table 18 and supplementary Table 17). The majority of these down-regulated genes function in transcription regulation (9 genes), protein modification and metabolism (8 genes), and transporting anions or proteins (5 genes).

[0372] Global gene expression patterns were obtained from single endoscopic pinch biopsies that were reproducible and representative of the local diseased area. We used unsupervised multidimensional scaling (MDS) on our IBD and healthy gene expression profiles to develop a systematic approach towards molecular classification of disease subtypes. A separation was observed of IBD from controls. While most CD cases were closely associated, two other CD cases localized with UC samples, underscoring the heterogeneous nature of IBD. The two CD patients have disease with involvement of the rectum, which are different from other CD patients with rectal sparing. These UC-like CD cases are often ANCA-positive.²⁴ The gene expression differences between these two subtypes of CD underscore the distinctive natures of Crohn's proctitis and others. Thus, with increasing sample size, unsupervised clustering may define stable, meaningful subgroups of CD and UC for further elucidation of differential gene signature.

[0373] The unsupervised MDS was able to distinguish IBD from acute bacterial colitis and healthy control samples. Recently, Burczynski, et al²⁵ attempted to classify CD and UC based on gene expression profiles of peripheral blood mononuclear cells of IBD patients. In that study supervised analysis, with pre-defined subgroups, was used first to identify a set of genes, followed by testing their accuracy in distinguishing UC and CD patient samples²⁵. In contrast, the entire data set was analyzed by unsupervised multidimensional scaling. This strategy allowed for an unbiased clustering of samples based on the original data, and the detection of sub-groups within each disease type.

[0374] Upon comparing our current biopsy study with previous gene expression studies of resected IBD tissues,¹²⁻¹⁶ it was noted that considerable overlaps in the differential expression patterns. These include expression of IL8, LCN2, NOS2A, REG1A, CXCL1, for example. Profiling of endoscopic biopsy tissues has identified several novel gene expression changes. Key gene expression differences in CD and UC speak of fundamentally different biological processes contributing to their pathogenesis. The genes over-expressed in CD are overwhelmingly those of acute phase, macrophage activation and antigen processing or presentation (Table 16). The proteasome is a multi-protein complex that degrades cellular or foreign protein. The peptides generated by immunoproteasome for MHC class I antigen presentation are translocated into the endoplasmic reticulum by TAP (transporter associated with antigen processing)²⁶. Over expression of proteasome subunit genes (PSME2, PSMB8, PSMB9, PSMB10), and TAP1 in CD affected tissues indicate that the processing pathway of class I MHC peptides is active in CD. Identification of mechanism of such up-regulation and the substrates of these immunoproteasomes may be helpful in understanding the pathophysiology of Crohn's disease.

[0375] The UC gene expression pattern suggests disruption of epithelial homeostasis. It was observed that a number of genes functioning in biosynthesis, metabolism, and transport are remarkably down regulated in UC. While the causes for such down regulations are unknown at this time, we speculate that functional loss of specific transcription factors and master regulators may be one reason. Nine (CCNT2, CHD1, HNF4G, KLF5, MLLT2, MYB, NR3C2, SATB2, ZNF217) of 64 genes that are down regulated in UC, are transcription regulators. Mucosal damage and loss of epithelia in chronic UC may be another factor. However, considering that many of the genes are also down regulated in the unaffected samples, we favor the idea that there may be a few key regulators that are affected in UC.

[0376] Genes that are consistently differentially expressed in both IBD affected and unaffected biopsies, such as PSKH1 and PPID, may represent early pathogenic changes in IBD. However, much more works is needed to characterize their roles in the development of IBD. PSKH1 plays a role in intracellular protein trafficking and Golgi apparatus maintenance²⁷. Its over expression in the IBD samples may reflect increased synthesis of immunoglobulins and other proteins. PPID encodes for peptidylprolyl isomerase D or cyclophilin D. This protein is a component of mitochondrial permeability transition pore which mediates cytochrome c release leading to apoptosis²⁸. The immunosuppressant cyclosporin A, used to treat severe IBD, particularly corticosteroid-refractory ulcerative colitis,²⁹ can bind the PPID protein³⁰ and reduce mitochondrial permeability and cytochrome c release. Thus, the underlying mechanism of the therapeutic effects of cyclosporin A may be mediated by binding to PPID.

[0377] The gene expression profiles have identified several candidate genes within these areas. These include apoptosis-regulating CASP10 at 2q33-34, and antigen-presenting gene PSME2 at 14q11.2 (locus IBD4) from CD profiles, as well as immune response gene IFI30 (19p13.1, IBD6) and Notch-signaling NOTCH3 (19p13.2-p13.1, IBD6) from the UC profiles. With respect to the IBD3 locus at 6p21,³⁶ HLA-DMA, HLA-DRB1, TAP1, UBD and PSMB8 at 6p21.3, are particularly intriguing.
[0378] 1. Fiocchi C. Inflammatory bowel disease: etiology and pathogenesis. Gastroenterology 1998; 115:182-205.
[0379] 2. Podolsky D K. Inflammatory bowel disease. N Engl J Med 2002; 347:417-29.
[0380] 3. Sartor R B. Current concepts of the etiology and pathogenesis of ulcerative colitis and Crohn's disease. Gastroenterol Clin North Am 1995; 24:475-507.
[0381] 4. Blumberg R S, Strober W. Prospects for research in inflammatory bowel disease. Jama 2001; 285:643-7.
[0382] 5. Marion J, Rubin P, D. P. Differential diagnosis of chronic ulcerative colitis and Crohn's disease. W. B. Saunders Company, 2000.
[0383] 6. Sands B E. From symptom to diagnosis: clinical distinctions among various forms of intestinal inflammation. Gastroenterology 2004; 126:1518-32.
[0384] 7. Golub T R, Slonim D K, Tamayo P, Huard C, Gaasenbeek M, Mesirov J P, Coller H, Loh M L, Downing J R, Caligiuri M A, Bloomfield C D, Lander E S. Molecular classification of cancer: class discovery and class prediction by gene expression monitoring. Science 1999; 286:531-7.
[0385] 8. Bittner M, Meltzer P, Chen Y, Jiang Y, Seftor E, Hendrix M, Radmacher M, Simon R, Yakhini Z, Ben-Dor A, Sampas N, Dougherty E, Wang E, Marincola F, Gooden C, Lueders J, Glatfelter A, Pollock P, Carpten J, Gillanders E, Leja D, Dietrich K, Beaudry C, Berens M, Alberts D, Sondak V. Molecular classification of cutaneous malignant melanoma by gene expression profiling. Nature 2000; 406:536-40.
[0386] 9. Hedenfalk I, Duggan D, Chen Y, Radmacher M, Bittner M, Simon R, Meltzer P, Gusterson B, Esteller M, Kallioniemi O P, Wilfond B, Borg A, Trent J. Gene-expression profiles in hereditary breast cancer. N Engl J Med 2001; 344:539-48.
[0387] 10. Yeoh E J, Ross M E, Shurtleff S A, Williams W K, Patel D, Mahfouz R, Behm F G, Raimondi S C, Relling M V, Patel A, Cheng C, Campana D, Wilkins D, Zhou X, Li J, Liu H, Pui C H, Evans W E, Naeve C, Wong L, Downing J R. Classification, subtype discovery, and prediction of outcome in pediatric acute lymphoblastic leukemia by gene expression profiling. Cancer Cell 2002; 1:133-43.
[0388] 11. Fuller G N, Hess K R, Rhee C H, Yung W K, Sawaya R A, Bruner J M, Zhang W. Molecular classification of human diffuse gliomas by multidimensional scaling analysis of gene expression profiles parallels morphology-based classification, correlates with survival, and reveals clinically-relevant novel glioma subsets. Brain Pathol 2002; 12:108-16.
[0389] 12. Lawrance I C, Fiocchi C, Chakravarti S. Ulcerative colitis and Crohn's disease: distinctive gene expression profiles and novel susceptibility candidate genes. Hum Mol Genet 2001; 10:445-56.
[0390] 13. Dieckgraefe B K, Stenson W F, Korzenik J R, Swanson P E, Harrington C A. Analysis of mucosal gene expression in inflammatory bowel disease by parallel oligonucleotide arrays. Physiol Genomics 2000; 4:1-11.
[0391] 14. Uthoff S M, Eichenberger M R, Lewis R K, Fox M P, Hamilton C J, McAuliffe T L, Grimes H L, Galandiuk S. Identification of candidate genes in ulcerative colitis and Crohn's disease using cDNA array technology. Int J Oncol 2001; 19:803-10.
[0392] 15. Dooley T P, Curto E V, Reddy S P, Davis R L, Lambert G W, Wilborn T W, Elson C O. Regulation of gene expression in inflammatory bowel disease and correlation with IBD drugs: screening by DNA microarrays. Inflamm Bowel Dis 2004; 10:1-14.
[0393] 16. Langmann T, Moehle C, Mauerer R, Scharl M, Liebisch G, Zahn A, Stremmel W, Schmitz G. Loss of detoxification in inflammatory bowel disease: dysregulation of pregnane X receptor target genes. Gastroenterology 2004; 127:26-40.
[0394] 17. Hommes D W, van Deventer S J. Endoscopy in inflammatory bowel diseases. Gastroenterology 2004; 126:1561-73.
[0395] 18. Costello C M, Mah N, Hasler R, Rosenstiel P, Waetzig G H, Hahn A, Lu T, Gurbuz Y, Nikolaus S, Albrecht M, Hampe J, Lucius R, Kloppel G, Eickhoff H, Lehrach H, Lengauer T, Schreiber S. Dissection of the inflammatory bowel disease transcriptome using genome-wide cDNA microarrays. PLoS Med 2005; 2:e199.
[0396] 19. Okahara S, Arimura Y, Yabana T, Kobayashi K, Gotoh A, Motoya S, Imamura A, Endo T, Imai K. Inflammatory gene signature in ulcerative colitis with cDNA macroarray analysis. Aliment Pharmacol Ther 2005; 21:1091-7.
[0397] 20. Colombel J F, Grandbastien B, Gower-Rousseau C, Plegat S, Evrard J P, Dupas J L, Gendre J P, Modigliani R, Belaiche J, Hostein J, Hugot J P, van Kruiningen H, Cortot A. Clinical characteristics of Crohn's disease in 72 families. Gastroenterology 1996; 111:604-7.
[0398] 21. Li C, Wong W H. Model-based analysis of oligonucleotide arrays: expression index computation and outlier detection. Proc Natl Acad Sci USA 2001; 98:31-6.
[0399] 22. Torgerson W S. Theory and Methods of Scaling. Wiley, 1958.
[0400] 23. Tusher V G, Tibshirani R, Chu G. Significance analysis of microarrays applied to the ionizing radiation response. Proc Natl Acad Sci USA 2001; 98:5116-21.
[0401] 24. Vasiliauskas E A, Kam L Y, Karp L C, Gaiennie J, Yang H, Targan S R. Marker antibody expression stratifies Crohn's disease into immunologically homogeneous subgroups with distinct clinical characteristics. Gut 2000; 47:487-96.
[0402] 25. Burczynski M E, Peterson R L, Twine N C, Zuberek K A, Brodeur B J, Casciotti L, Maganti V, Reddy P S, Strahs A, Immermann F, Spinelli W, Schwertschlag U, Slager A M, Cotreau M M, Domer A J. Molecular classification of Crohn's disease and ulcerative colitis patients using transcriptional profiles in peripheral blood mononuclear cells. J Mol Diagn 2006; 8:51-61.
[0403] 26. Begley G S, Horvath A R, Taylor J C, Higgins C F. Cytoplasmic domains of the transporter associated with antigen processing and P-glycoprotein interact with subunits of the proteasome. Mol Immunol 2005; 42:137-41.
[0404] 27. Brede G, Solheim J, Stang E, Prydz H. Mutants of the protein serine kinase PSKH1 disassemble the Golgi apparatus. Exp Cell Res 2003; 291:299-312.
[0405] 28. Machida K, Osada H. Molecular interaction between cyclophilin D and adenine nucleotide translocase in cytochrome c release: does it determine whether cytochrome c release is dependent on permeability transition or not? Ann N Y Acad Sci 2003; 1010:182-5.
[0406] 29. Pham C Q, Efros C B, Berardi R R. Cyclosporine for severe ulcerative colitis. Ann Pharmacother 2006; 40:96-101.
[0407] 30. Hoffmann K, Kakalis L T, Anderson K S, Armitage I M, Handschumacher R E. Expression of human cyclophilin-40 and the effect of the His141-->Trp mutation on catalysis and cyclosporin A binding. Eur J Biochem 1995; 229:188-93.
[0408] 31. Morley M, Molony C M, Weber T M, Devlin J L, Ewens K G, Spielman R S, Cheung V G. Genetic analysis of genome-wide variation in human gene expression. Nature 2004; 430:743-7.
[0409] 32. Satsangi J, Parkes M, Louis E, Hashimoto L, Kato N, Welsh K, Terwilliger J D, Lathrop G M, Bell J I, Jewell D P. Two stage genome-wide search in inflammatory bowel disease provides evidence for susceptibility loci on chromosomes 3, 7 and 12. Nat Genet 1996; 14:199-202.
[0410] 33. Hugot J P, Thomas G. Genome-wide scanning in inflammatory bowel diseases. Dig Dis 1998; 16:364-9.
[0411] 34. Cho J H, Nicolae D L, Gold L H, Fields C T, LaBuda M C, Rohal P M, Pickles M R, Qin L, Fu Y, Mann J S, Kirschner B S, Jabs E W, Weber J, Hanauer S B, Bayless T M, Brant S R. Identification of novel susceptibility loci for inflammatory bowel disease on chromosomes 1p, 3q, and 4q: evidence for epistasis between 1p and IBD1. Proc Natl Acad Sci USA 1998; 95:7502-7.
[0412] 35. Brant S R, Shugart Y Y. Inflammatory bowel disease gene hunting by linkage analysis: rationale, methodology, and present status of the field. Inflamm Bowel Dis 2004; 10:300-11.
[0413] 36. Hampe J, Shaw S H, Saiz R, Leysens N, Lantermann A, Mascheretti S, Lynch N J, MacPherson A J, Bridger S, van Deventer S, Stokkers P, Morin P, Mirza M M, Forbes A, Lennard-Jones J E, Mathew C G, Curran M E, Schreiber S. Linkage of inflammatory bowel disease to human chromosome 6p. Am J Hum Genet 1999; 65:1647-55.

### Example 3

### Patient Selection and Endoscopic Pinch Biopsy Acquisition

[0414] The study includes patients and control individuals recruited at the Meyerhoff IBD Center from 2001-2003 (Table. 19). Diagnosis of patients was based on primary endoscopic, pathologic and radiology reports using standard diagnostic criteria. ^{10, 15} Patients undergoing colonoscopy included CD and UC patients, non-IBD colitis, and non-IBD healthy controls. All healthy controls were negative for colorectal cancer on screening. All patients received Golytely® colonic preparation.

TABLE 19
Sample information

| | | | Disease | | | | | | | |
|---|---|---|---|---|---|---|---|---|---|---|
| | Age | | | Duration | | Endoscopy | | Histology | | |
| Sample¹ | (years) | Sex | Location | (years) | | Site² | definition | Inflammation³ | Fibrosis⁴ | Medication⁵ |
| CD33aff | 24 | M | colonic | 4 | | Sigmoid | affected | ++ | + | a, c, d |
| CD33un | | | | | | T. colon | unaffected | − | − | |
| CD45un2 | 37 | F | colonic | 12 | | Cecum | affected | − | + | a, b, d |
| CD45un | | | | | | A. colon | unaffected | − | − | |
| CD48un | 44 | M | ileal | 20 | | T. colon | unaffected | − | − | a, b |
| CD48un2 | | | | | | T. colon | unaffected | − | − | |
| CD49aff | 21 | F | ileocolonic | 3 | | Cecum | affected | + | + | a, b, c, d |
| CD49un | | | | | | Rectum | unaffected | − | + | |
| CD51aff | 39 | M | ileocolonic | 15 | | Sigmoid | affected | ++ | + | a, c |
| CD51un | | | | | | SF. colon | unaffected | − | − | |
| CD53aff | 55 | M | colonic | 15 | | Rectum | affected | +++ | ++ | c, d |
| CD53un | | | | | | T. colon | unaffected | − | − | |
| CD58aff | 51 | F | colonic | 10 | | SF. colon | affected | + | + | a, c |
| CD58un | | | | | | D. colon | unaffected | − | − | |
| CD59un2 | 32 | M | ileocolonic | 15 | | T. colon | affected | − | − | a |
| CD59un | | | | | | D. colon | unaffected | − | − | |
| CD76aff1 | 76 | M | colonic | 2 | | Sigmoid | affected | ++ | ++ | a, b |
| CD76aff2 | | | | | | Sigmoid | affected | ++ | ++ | |
| CD76un | | | | | | Rectum | unaffected | − | − | |
| Mean | 42.1 | | | 13 | | | | | | |
| Range | 21-76 | | | 1-30 | | | | | | |
| UC32aff | 82 | F | Pancolitis | 15 | | Rectum | affected | + | ++ | a |
| UC32un | | | | | | R. colon | unaffected | − | + | |
| UC35aff | 40 | F | Distal | 24 | | Rectum | affected | ++ | ++ | c, d |
| | | For | | | | | | | | |
| | | Peer | | | | | | | | |
| | | Review | | | | | | | | |
| UC35un | | | | | | A. colon | unaffected | − | − | |
| UC38aff | 60 | M | Distal | 12 | | Sigmoid | affected | + | − | a, c |
| UC38un | | | | | | A. colon | unaffected | − | − | |
| UC55aff | 64 | F | Distal | 46 | | Rectum | affected | ++ | ++ | a, d |
| UC55un | | | | | | HF. colon | unaffected | − | − | |
| UC71aff | 54 | M | Pancolitis | 3 | y | Sigmoid | affected | + | ++ | a |
| Mean | 60 | | | 20 | | | | | | |
| Range | 40-82 | | | 3-46 | | | | | | |
| INF156 | 33 | F | Distal | 1/12 | | Sigmoid | affected | ++ | − | b |
| INF157 | 72 | F | colon | 2/12 | | Rectum | affected | +++ | − | b |
| IC44aff | 45 | M | colon | 4 | | Sigmoid | affected | + | − | a, b |
| IC44un | | | | | | D. colon | affected | − | − | |
| Mean | 50 | | | | | | | | | |
| Range | 33-72 | | | <4 | | | | | | |
| N65 | 22 | F | | | | Sigmoid | normal | −− | | |
| N66 | 64 | M | | | | Sigmoid | normal | | | |
| N69 | 65 | F | | | | Sigmoid | normal | −− | | |
| N79 | 57 | F | | | | Sigmoid | normal | −− | | |
| Mean | 52 | | | | | | | | | |
| Range | 22-64 | | | | | | | | | |

[0415] Endoscopic pinch biopsies for affected and unaffected areas of IBD cases were obtained from various regions of the colon as listed in Table 19. The samples were tentatively labeled as “affected” when the biopsy was taken from an area appearing grossly affected, and as “unaffected” when taken from an area appearing disease-free, and located 10 cm away from diseased areas. Classification of “affected” or “unaffected” samples for the microarray study was confirmed in a blinded manner by histological examination of adjacent biopsy samples for the presence or absence of acute or chronic inflammation by a gastroenterology pathologist (A.M.). CD-45, -48 and -59 initially included as affected biopsy samples in the microarray study were subsequently labeled as “unaffected” (un2) because adjacent biopsies did not demonstrate active inflammation.

### RNA Isolation and Microarray

[0416] Each biopsy, approximately 2×2×3 mm³ and weighing 2-7 mg (mean=4.7 mg, n=6 biopsies), produced ˜5 μg total RNA (TRIzol Reagent, Invitrogen), yielding 15 μg of biotin-labeled cRNA (https://www.affymetrix.com/support/technical/manual/). The biotinylated cRNA (10 μg per array) was hybridized to high-density oligonucleotide GeneChip Human Genome U95Av2 arrays (12,625 probe sets for 9662 unique transcripts, UniGene database, Build #95, Affymetrix). The arrays were washed and stained (R-Phycoerythrin Streptavidin) in a GeneChip Fluidics Station 400. Images captured in a HP Gene Array Scanner were analyzed first by Microarray Suite 5.0 software (Affymetrix). Each transcript received a “present” or “absent” designation based on whether the gene transcript was detected in the sample. The background intensities were low (40±0.6 to 52±1.0 arbitrary units), with ˜48.4% to 56.9% of all 12,625 probe sets marked as “present” in the biopsy samples, consistent with our previous study of whole colon tissue resections.⁵ The complete dataset is available at the NCBI Gene Expression Omnibus (which may be found on the world wide web at www.ncbi.nlm.nih.gov/geo), GSE 6731.

### Microarray Data Analysis

[0417] The DNA-Chip Analyzer (dChip) software¹⁶ was used to normalize the data from the image files for array-to-array comparisons. We used (1) classical Multidimensional Scaling (MDS),¹⁷ which provides a two-dimensional rendering of the data to show the correlation of the gene expression among various samples,¹⁸ such that, samples with similar expression profiles lie closer to each other, and (2) Significance Analysis of Microarrays (SAM) software,¹⁹ to select biologically significant changes in gene expression between groups. The criteria selected for SAM analysis are, a median false discovery rate (FDR) ≦0.00001%, fold change >2, and a Log₂ mean expression index >6.64.

### Quantitative RT-PCR

[0418] Expressions of genes (PSME2, PSMB8, ADM, STAT3, CXCL1, DMBT1 and GAPDH) were quantified by real-time RT-PCR using QuantiTect SYBR Green PCR Kit (Qiagen Inc., Valencia, USA) according to manufacturer's instruction. The specific primers for genes selected are as follows: GAPDH sense primer, 5′-GTC-TCC-TCT-GAC-TTC-AAC-A-3′; GAPDH antisense primer, 5′-CAG-GAA-ATG-AGC-TTG-ACA-AA-3′; PSME2 sense primer, 5′-ACC-TGA-TCC-CCA-AGA-TTG-AA-3′; PSME2 antisense primer, 5′-TGG-AAA-TGG-TTG-TCT-GGA-AAG-3′; PSMB8 sense primer, 5′-TAA-GTC-CAA-GGA-GAA-GAA-GAG-3′; PSMB8 antisense primer, 5′-CAA-ATA-GAG-AAC-ACG-CAG-AAG-A-3′; ADM sense primer, 5′-CAG-CGA-GTG-TAA-AGT-TG-3′; ADM anti sense primer, 5′-GAG-TCG-GTG-TTT-CCT-TCT-TC-3′; DMBT1 sense primer, 5′-TGC-TGT-ACT-GAC-CTT-GTT-TG-3′; DMBT1 antisense primer, 5′-GGG-TCC-GTA-GGT-GTC-ATC-3′; CXCL1 sense primer, 5′-CCA-AAG-TGT-GAA-CGT-GAA-G-3′; CXCL1 antisense primer, 5′-TGG-GGG-ATG-CAG-GAT-TGA-3′; STAT3 sense primer, 5′-TTT-TAC-CAA-GCC-CCA-AT-3′; STAT3 antisense primer, 5′-TGC-TCG-ATG-CTC-AGT-CCT-3′. The reactions were performed on an ABI PRISM 7900HT system (Applied Biosystems, Foster City, Calif., USA) as follows: initial step at 95° C. for 15 min and 40 cycles at 95° C. for 15 sec, 55° C. for 30 sec and 72° C. for 30 sec followed by a step of ramp temperature from 60° C. to 95° C. at the rate of 2%. The relative expression value is defined as 2^{ΔC}^{_{T}}, where ΔC_{T}=(C_{T} of GAPDH−C_{T} of gene X)−(C_{T} of GAPDH no template control−C_{T} of gene X no template control).

### Immunohistochemistry

[0419] Immunohistochemistry was performed on paraffin-embedded sections of colonoscopic pinch biopsies from 2 CD and 2 healthy controls. An ABC-staining kit with the rabbit anti-human TAP1 antibody (Santa Cruz Biotechnology, Santa Cruz, USA) was used. The slides were counter-stained with Hematoxylin Gill No. 2 (Sigma).

### Statistical Analysis

[0420] The quantitative RT-PCR results were presented as Box-Whisker charts using Microcal Origin v6.0 (Microcal Software, Inc. Northampton, Mass.). The box represents 25th and 75th percentiles of the data set, with the 50th percentile shown as a line in the box, and the data range (1 to 99 percentile) is indicated by the whiskers. Statistical analyses were performed with one-way unpaired Student's t test for comparing pairs of groups and P<0.05 was considered statistically significant. To test whether distribution of samples in the MDS plot was dependent on gene expression or location of biopsy samples in the colon, a non-parametric test of statistical significance was performed using the Chi square test.

[0421] A total of nine CD, six UC, one clinically reclassified as indeterminate colitis (IC), two infectious colitis (INF) and four healthy control individuals were recruited for this study. For each individual included in the study information on age, gender, medications, disease location, duration, biopsy site and presence of inflammation and fibrosis as assessed by histology are provided in Table 19. The IBD biopsy samples were finally designated as “affected” or “unaffected” based on the histopathology of adjacent biopsies (FIG. 11). Control and unaffected biopsies essentially displayed normal colonic architecture. In contrast, biopsies marked as “affected” manifested variable degrees of acute or chronic colitis, including one or more of the following histologic features: cryptitis, with or without accompanying crypt abscesses, crypt distortion, lamina propria fibrosis, crypt dropout, basal lymphoplasmacytosis, and Paneth cell metaplasia. None of the biopsies indicated evidence of colitis-associated epithelial dysplasia or neoplasia (data not shown).

### Reproducibility of Gene Expression Patterns

[0422] To evaluate if one pinch biopsy was representative of disease in that colonic segment, and to estimate variations in gene expression that could arise from separate samplings, expression patterns of 2 biopsies, 10 cm apart, from one affected area of a CD patient (CD76aff1 and CD76aff2) were analyzed. We chose Crohn's disease because of its characteristic focal areas of tissue damage interspersed with relatively normal appearing tissues. Between CD76aff1 and CD76aff2, only ten of the 3384 “present” genes classified as present by the Microarray Suite software (Methods), demonstrated a greater than two fold difference in expression, with an error of 0.29% in independent gene expression measurements (FIG. 12). Thus, the gene expression pattern from a single endoscopic pinch biopsy was considered a highly reproducible reflection of gene expression in a given tissue designation.

### Sample Classification by Multidimensional Scaling

[0423] A clustering method of multidimensional scaling (MDS) was applied to the entire microarray data set (36 profiles). The purpose of this exercise was to determine if CD, UC and non-IBD colitis display consistent gene expression differences due to inherent pathogenic differences, such that samples can be separated based on their expression patterns alone. The MDS analysis employs an unsupervised (no pre-defined groups) method such that samples are placed in a two-dimensional space, in which the distance between samples reflects the degree of correlation and samples sharing gene expression similarities appear closer together in such a plot. The samples showed some grouping and separation along the first three axes/components. A graphical representation of component 1 versus component 2 resulted in separation of samples along component 2, with affected tissues placed above the horizontal median in the two upper quadrants (Q1 and Q4) and unaffected tissues and healthy controls in the lower two quadrants (Q2 and Q3) (FIG. 14A). Thus component 2 is the major axis that appeared to separate disease from unaffected and normal samples. There was some clustering of CD and separation from UC along component 1 axis. Four CD cases with active disease were clustered together in Q1 (CD 51, CD49, CD58 and CD76); clinically these have ileocolonic and colonic disease involvement with rectal sparing. Two other CD cases, CD 33 and CD53, positioned with UC samples in Q4, presented rectal disease, with high histopathologic inflammation scores. CD33 had disease extending from the rectum to the splenic flexure, without more proximal involvement resembling UC; CD53 had significant disease in the distal 20 cm of the colon, and inactive disease in the ascending and descending colon, also resembling UC. The two INF samples appeared in Q1, separated from normal controls and unaffected IBD samples. Three of the UC affected samples were positioned in Q4, while UC32aff and UC71aff, with pancolitis, appeared with CD affected samples in Q1. The normal controls were clearly separated from affected colitis samples, and placed in Q2. Unaffected UC samples were separated from the normal controls and placed in Q3 whereas about half of the CD unaffected samples were placed in Q2 with the normal controls and the rest with UC unaffected in Q3. The component 2 versus component 3 MDS plot was far more effective in separating infectious colitis from IBD (FIG. 14B); in this plot the INF samples were distanced from all IBD except two UC affected cases (UC71 and UC35). Overall, MDS analysis allowed certain clustering of samples along disease types.

[0424] One concern was that site of origin for the biopsy samples could be affecting the MDS distribution. Therefore we examined the correlation between distribution of samples in the MDS plots and biopsy site or disease type. The normal controls came from the sigmoid colon and appeared below the horizontal axis in Q2 of the first MDS plot (FIG. 14C). Several affected samples were also from the sigmoid colon, yet these did not appear with the control sigmoid colon samples. Rather, affected sigmoid colon samples appeared above the horizontal axis in Q1 and Q4, with other disease biopsy samples. A chi square test (Table. 20A) of our hypothesis, that disease samples (CDaff, UCaff and INF) have a non-random distribution along component 2, above the horizontal axis in Q1 and Q4, while unaffected and normal samples below the horizontal axis, in Q2 and Q3, yielded a highly significant (p<0.001) chi square value of 27.708 with one degree of freedom. We next tested if biopsy site affected distribution of samples in the MDS plot. The distribution of biopsy samples, C1 (rectum+sigmoid colon), C2 (descending colon+splenic flexure), C3 (transverse colon) and C4 (hepatic flexure, ascending colon+cecum), was tested in Q1Q4 above the horizontal axis, or Q2Q3 below the horizontal axis. A chi square value of 7.03 at three degrees of freedom, and p≦0.1 indicated that their distribution in the MDS plot occurred at random and not correlated to biopsy location (Table. 20B). Moreover, a recent study reported that systematic comparison of gene expression from biopsies taken from different regions within the large intestine showed no significant difference¹⁴. A mouse study has also shown that within the large intestine gene expression patterns from different areas were similar, while expression patterns tended to vary between the stomach, small and large intestine.²⁰ We further found that the position of samples in the MDS map was independent of patients' age, gender, disease duration or medication.

TABLE 20A
Distribution of diseased/non-diseased samples in MDS

| Sample | Q1Q4 | Q2Q3 | Total |
|---|---|---|---|
| D | 14 | 0 | 14 |
| N | 2 | 19 | 21 |
| Total | 16 | 19 | 35 |

D: diseased,
N: non-diseased or healthy control or unaffected.
Q1-Q4: quadrants from FIG. 14A.
Degrees of freedom = 1, Chi square = 27.708, with P_0.001, the distribution is significant.

TABLE 20B
Distribution of biopsy location in MDS

| Sample | Q1Q4 | Q2Q3 | Total |
|---|---|---|---|
| C1 | 12 | 6 | 18 |
| C2 | 1 | 3 | 4 |
| C3 | 2 | 4 | 6 |
| C4 | 1 | 6 | 7 |
| Total | 16 | 19 | 35 |

C1: rectum and sigmoid colon,
C2: descending colon and splenic flexure,
C3: transverse colon and
C4: hepatic flexure, ascending colon and cecum. Degrees of freedom = 3 Chi square = 7.03262, with P_0.1, the distribution is not significant.

### Significance Analysis of Microarrays to Identify Genes Differentially Expressed in IBD Compared to Normal Controls

[0425] The MDS analysis indicated that the gene expression patterns in affected biopsy samples from IBD were sufficiently different for these to be separated from normal controls and that, among the affected samples, there was some indication of disease-biased separation of samples. Therefore, we next proceeded to identify genes expression differences that define CD and UC and distinguish these from non-IBD colitis. A Significance Analysis of Microarrays (SAM) was performed on the gene expression data, using a set of stringent criteria (see Methods) to identify differences in CD affected, UC affected and infectious colitis as a non-IBD inflammatory control compared to normal controls. A numeric distribution of differentially expressed genes is shown in Table 21. Up regulated genes included 47 in CD affected, 51 in UC affected and 10 in INF, while 30 genes in CD, 81 in UC and 53 in INF were down regulated (Table. 21). UC and CD share 25 up-regulated and 18 down regulated genes. Of the 10 up regulated genes in INF, 4 were commonly up regulated in UC and CD. There was a greater similarity between UC and INF with respect to down regulated genes with 20 genes commonly down regulated in both.

TABLE 21

| | | |
|---|---|---|
| CD | UC | INF |

| | | | | | | |
|---|---|---|---|---|---|---|
| CD | 47 | 30 | 25 | 18 | 5 | 6 |
| UC | 25 | 18 | 51 | 81 | 4 | 20 |
| INF | 5 | 6 | 4 | 20 | 10 | 53 |

Over expressed genes are in red and under expressed genes in green.

[0426] FIG. 15 shows a heat image of all differentially expressed genes in affected IBD samples compared to normal control. Genes preferentially over expressed in CD (Table. 22) included interferon γ inducible genes (IFITM1, IFITM3, STAT1 and STAT3) and those regulating antigen processing and presentation (TAP1, PSME2, PSMB8, PSMB9 and PSMB10). Down regulated genes in CD included WEE1, SPON1 and THBS1 that may be indicative of altered cell-proliferation and cell-ECM adhesion properties. NOS2A, REG3A, IL 8, S100A9, CXCL1, CXCL2 and CXCL3 functioning in inflammatory processes, were up regulated in both CD and UC (Table. 23), while S100A9, CXCL1 and CXCL3 were also elevated in INF. The CXC chemokine ligands regulate chemotaxis and inflammatory cell influx, and their up regulation in infectious colitis suggests that these genes mediate inflammatory events common to most colitis types. Overlapping down regulations in UC and CD (Table. 23) included genes required for maintaining epithelial cellular architecture (adducin3) and epithelial tight junctions (Claudin8), and may reflect pathogenic changes in epithelial integrity secondary to intestinal inflammation. ABCB1, encoding the multidrug resistance p-glycoprotein 170 was down regulated in UC, CD and INF. Genes with biased over expression in UC (Table. 24) included those regulating trans-endothelial migration of platelets and leukocytes (PECAM1), B lymphocyte functions (CD79A, POU2AF1), inflammation mediators that were not detected in either Crohn's or infectious colitis, such as, CCL11, PTGDS, TNFRSF7, and ECM-remodeling genes MMP12 and TIMP1. Genes down-regulated in UC related to biosynthetic and metabolic processes (UGDH, PCK1, GGH), transcription (CCNT2, CHD1, HNF4G, KLF5, MLLT2, MYB, NR3C2, SATB2, ZNF217), protein trafficking (TNPO1, SCAMP1, VPS13A), epithelial electrolyte and water transport (ATP2B1, SLC16A1, SLC26A2, AQP8). A number of genes functioning in transport of electrolyte (SLC26A2, GUCA2A and GUCA2B) and water (AQP8) were also down regulated in infectious colitis.

TABLE 22
Differential gene expression in affected CD compared to healthy control

| | Symbol | Biological impliciation | Cytoband |
|---|---|---|---|
| Up-regulated Gene | | | |
| Adrenomedullin | ADM | Acute-phase response | 11p15.4 |
| Serum amyloid A1 | SAA1 | Acute-phase response | 11p15.1 |
| Serine/cysteine proteinase inhibitor, clade A, 1 | SERPINA1 | Acute-phase response | 14q32.1 |
| Signal transducer and activator of transcription 1 | STAT1 | Acute-phase response | 2q32.2 |
| Signal transducer and activator of transcription 3 | STAT3 | Acute-phase response | 17q21.31 |
| MHC, class II, DR beta 5 | HLA-DRB5 | Antigen presentation | 6p21.3 |
| Transporter 1, ATP-binding cassette, sub-family B | TAP1 | Antigen presentation | 6p21.3 |
| Proteasome activator subunit 2 (PA28 beta) | PSME2 | Antigen presentation | 14q11.2 |
| Proteasome subunit, beta type, 8 | PSMB8 | Antigen presentation | 6p21.3 |
| Proteasome subunit, beta type, 9 | PSMB9 | Antigen presentation | 6p21.3 |
| Proteasome subunit, beta type, 10 | PSMB10 | Antigen presentation | 16q22.1 |
| Interferon, alpha-inducible protein (clone IFI-6- | G1P3 | Immune response | 1p35 |
| 16) | | | |
| Leukocyte Ig-like receptor, subfamily B, member 1 | LILRB1 | Antigen binding | 19q13.4 |
| Interferon induced transmembrane protein 1 (9- | IFITM1 | Macrophage activation | 11p15.5 |
| 27) | | | |
| Interferon induced transmembrane protein 3 (1- | IFITM3 | Macrophage activation | 11p15.5 |
| 8U) | | | |
| Interferon stimulated gene 20 kDa | ISG20 | Macrophage activation | 15q26 |
| Caspase 10 | CASP10 | Apoptosis | 2q33-q34 |
| Mucin 4, tracheobronchial | MUC4 | Cell adhesion | 3q29 |
| Regenerating islet-derived 1 beta | REG1B | Cell proliferation | 2p12 |
| Mucin 1, transmembrane | MUC1 | Cytoskeleton | 1q21 |
| Serine protease inhibitor, Kazal type 4 | SPINK4 | Endopeptidase inhibitor | 9p13.3 |
| Lipin 1 | LPIN1 | Adipocyte | 2p25.1 |
| | | differentiation | |
| Down-regulated | | | |
| Down syndrome critical region gene 1-like 1 | DSCR1L1 | Calcium-mediated | 6p21.1-p12.3 |
| | | signaling | |
| Spondin 1, extracellular matrix protein | SPON1 | Cell adhesion | 11p15.2 |
| Thrombospondin 1 | THBS1 | Cell motility | 15q15 |
| Chemokine (C—X—C motif) ligand 12 | CXCL12 | Chemotaxis | 10q11.1 |
| Stathmin-like 2 | STMN2 | Neuron cell | 8q21.13 |
| | | differentiation | |
| Serine/cysteine proteinase inhibitor, clade B, 7 | SERPINB7 | Proteinase inhibitor | 18q21.33 |
| WEE1 homolog (S. pombe) | WEE1 | Regulation of cell cycle | 11p15.3-p15.1 |
| Myosin, heavy polypeptide 11, smooth muscle | MYH11 | Striated muscle | 16p13.13-P13.12 |
| | | contraction | |
| Chromosome 14 ORF116 (checkpoint | CHES1 | Transcription regulation | 14q24.3-q32.11 |
| suppressor 1) | | | |
| Pre-B-cell leukemia transcription factor 3 | PBX3 | Transcription regulation | 9q33-q34 |
| Autism susceptibility candidate 2 | AUTS2 | Unknown | 7q11.22 |
| Poliovirus receptor-related 3 | PVRL3 | Unknown | 3q13 |

TABLE 23
Gene expression overlaps in CD and UC compared to healthy control

| | | Biological | |
|---|---|---|---|
| | Symbol | implication | Cytoband |
| Up-regulated | | | |
| Ig heavy constant gamma 4 (G4m marker) | IGHG4 | Antigen binding | 14q32.33 |
| MHC, class II, DM alpha | HLA-DMA | Antigen presentation | 6p21.3 |
| MHC, class II, DR beta 1 | HLA- | Antigen presentation | 6p21.3 |
| | DRB1 | | |
| Defensin, alpha 6, Paneth cell-specific | DEFA6 | Antimicrobial | 8pter-p21 |
| Chemokine (C—X—C motif) ligand 1 | CXCL1 | Chemotaxis | 4q21 |
| Chemokine (C—X—C motif) ligand 2 | CXCL2 | Chemotaxis | 4q21 |
| Chemokine (C—X—C motif) ligand 3 | CXCL3 | Chemotaxis | 4q21 |
| Interleukin 8 | IL8 | Chemotaxis | 4q13-q21 |
| B-factor, properdin | BF | Immune response | 6p21.3 |
| Decay accelerating factor for complement | DAF | Immune response | 1q32 |
| Deleted in malignant brain tumors 1 | DMBT1 | Immune response | 10q25.3-q26.1 |
| Lipocalin 2 (oncogene 24p3) | LCN2 | Inflammatory response | 9q34 |
| Nitric oxide synthase 2A (inducible, hepatocytes) | NOS2A | Inflammatory response | 17q11.2-q12 |
| Regenerating islet-derived 3 alpha | REG3A | Inflammatory response | 2p12 |
| S100 calcium binding protein A9 (MRP14) | S100A9 | Inflammatory response | 1q21 |
| Caspase 1 | CASP1 | Apoptosis | 11q23 |
| Peptidylprolyl isomerase D (Cyclophilin D) | PPID | Apoptosis suppressor | 4q31.1 |
| Pim-2 oncogene | PIM2 | Cell proliferation | Xp11.23 |
| Regenerating islet-derived 1 alpha | REG1A | Cell proliferation | 2p12 |
| Tryptophanyl-tRNA synthetase | WARS | Cell proliferation | 14q32.31 |
| | | inhibition | |
| Regulator of G-protein signalling 3 | RGS3 | Inactivation of MAPK | 9q32 |
| Hypothetical protein FLJ12443 | FLJ12443 | Muscle development | 5p15.33 |
| Protein serine kinase H1 | PSKH1 | Protein phosphorylation | 16q22.1 |
| Ubiquitin-conjugating enzyme E2L 6 | UBE2L6 | Ubiquitin cycle | 11q12 |
| PDZK1 interacting protein 1 For Peer Review | PDZK1IP1 | Unknown | 1p33 |
| Down-regulated | | | |
| Adducin 3 (gamma) | ADD3 | Calmodulin binding | 10q24.2-q24.3 |
| Claudin 8 Protein kinase C, iota | CLDN8 | Cell-cell adhesion Cell | 21q22.11 3q26.3 |
| | PRKCI | polarity maintenance | |
| UDP glycosyltransferase 8 | UGT8 | Nervous development | 4q26 |
| BTB (POZ) domain containing 3 | BTBD3 | Protein binding | 20p12.2 |
| Protein kinase C-like 2 | PKN2 | Protein phosphorylation | 1p22.2 |
| Protein kinase, cAMP-dependent, catalytic, beta | PRKACB | Protein phosphorylation | 1p36.1 |
| ATP-binding cassette, sub-family B | ABCB1 | Transporter Transport, | 7q21.1 4q21 |
| (MDR/TAP), 1 Solute carrier family 4, member 4 | SLC4A4 | anion | |
| MAX interactor 1 | MXI1 | Transcription regulation | 10q24-q25 |
| Sp3 transcription factor | SP3 | Transcription regulation | 2q31 |
| Frizzled-related protein | FRZB | Wnt receptor signaling | 2qter |
| Fk506-Binding Protein, Alt. Splice 2 | — | Unknown | — |
| mRNA; cDNA DKFZp586B211 | — | Unknown | — |
| Chromosome 14 open reading frame 11 | C14orf11 | Unknown | 14q13.1 |
| Creatine kinase, brain | CKB | Unknown | 14q132 |
| Transcribed sequences | KIAA1651 | Unknown | — |
| Putative MAPK activating protein | TIPRL | Unknown | 1q23.2 |

TABLE 24
Differential gene expression in affected UC tissues compared to healthy
control

| | Symbol | Biological implication | Cytoband |
|---|---|---|---|
| Up-regulated Gene | | | |
| Coronin, actin binding protein, 1A | CORO1A | Cell motility | 16p11.2 |
| Matrix metalloproteinase 12 | MMP12 | Cell motility | 11q22.3 |
| Platelet/endothelial cell adhesion molecule | PECAM1 | Cell motility | 17q23 |
| (CD31) | | | |
| Talin 1 | TLN1 | Cell motility | 9p13 |
| Tissue inhibitor of metalloproteinase 1 | TIMP1 | Cell motility | Xp11.3-p11.23 |
| Interferon, gamma-inducible protein 30 | IFI30 | Immune response | 19p13.1 |
| POU domain, class 2, associating factor 1 | POU2AF1 | Immune response, | 11q23.1 |
| | | humoral | |
| Clusterin (complement lysis inhibitor, SP-40,40) | CLU | Immune | 8p21-p12 |
| | | response/apoptosis | |
| TNF receptor superfamily, member 7 | TNFRSF7 | Immune | 12p13 |
| | | response/apoptosis | |
| Prostaglandin D2 synthase | PTGDS | Inflammatory response | 9q34.2-q34.3 |
| CD79A antigen (Ig-associated alpha) For Peer | CD79A | Defense response | 19q13.2 |
| Review | | | |
| Defensin, alpha 5, Paneth cell-specific | DEFA5 | Antimicrobial response | 8pter-p21 |
| Ubiquitin D | UBD | Antimicrobial response | 6p21.3 |
| Chemokine (C-C motif) ligand 11 | CCL11 | Chemotaxis, eosinophil | 17q21.1-q21.2 |
| Insulin-like growth factor binding protein 5 | IGFBP5 | Regulation of cell | 2q33-q36 |
| | | growth | |
| Endothelial cell growth factor 1 (platelet-derived) | ECGF1 | Angiogenesis | 22q13 |
| Fascin homolog 1, actin-bundling protein | FSCN1 | Cell proliferation | 7p22 |
| Ataxia telangiectasia mutated | ATM | Apoptosis | 11q22-q23 |
| Notch homolog 3 (Drosophila) | NOTCH3 | Notch signaling | 19p13.2-p13.1 |
| Protease inhibitor 3, skin-derived (SKALP) | PI3 | Endopeptidase inhibitor | 20q12-q13 |
| Nucleoporin 210 | NIP210 | Development | 3p25.2-p25.1 |
| AT rich interactive domain 5A (MRF1-like) | ARID5A | DNA binding | 2q11.2 |
| Pyruvate dehydrogenase kinase, isoenzyme 3 | PDK3 | Protein phosphorylation | Xp22.11 |
| Cathepsin H | CTSH | Proteolysis | 15q24-q25 |
| Lymphocyte cytosolic protein 1 (L-plastin) | LCP1 | Unknown | 13q14.3 |
| Stomatin | STOM | Unknown | 9q34.1 |
| Down-regulated | | | |
| Semaphorin 6A-1 | SEMA6A | Apoptosis | 5q23.1 |
| KIAA0931 protein (PH domain and leucine rich | PHLPPL | Biosynthesis, cAMP | 16q22.2 |
| Repeat protein phosphatase-like) | | | |
| Mitochondrial ribosomal protein S6 | MRPS6 | Biosynthesis, protein | 21q21.3-q22.1 |
| Sterol-C5-desaturase (ERG3 delta-5-desaturase | SC5DL | Biosynthesis, steroid | 11q23.3 |
| Homolog, fungal)-like | | | |
| Related RAS viral (r-ras) oncogene homolog 2 | SCP2 | Biosynthesis, steroid | 11p15.2 |
| UDP-glucose dehydrogenase | UGDH | Biosynthesis | 4p15.1 |
| Calpastatin | CAST | calpain inhibitor | 5q15-q21 |
| | | activity | |
| ADAM-like, decysin 1 | ADAMDEC1 | cell adhesion inhibition | 8p21.2 |
| Dynein, axonemal, heavy polypeptide 9 | DNAH9 | cell motility | 17p12 |
| Ephrin-A1 | EFNA1 | cell-cell signaling | 1q21-q22 |
| Fibroblast growth factor receptor 3 | FGFR3 | JAK-STAT signaling | 4p16.3 |
| Methylmalonyl Coenzyme A mutase | MUT | Metabolism | 6p21 |
| Phosphoenolpyruvate carboxykinase 1 (soluble) | PCK1 | Metabolism, | 20q13.31 |
| | | gluconeogenesis | |
| Gamma-glutamyl hydrolase | GGH | Metabolism, glutamine | 8q12.3 |
| N-acylsphingosine amidohydrolase-like | ASAHL | Metabolism | 4q21.1 |
| Acyl-Coenzyme A dehydrogenase, | ACADM | Metabolism, lipid | 1p31 |
| UDP glycosyltransferase 2 family, B28 | UGT2B28 | Metabolism, lipid | 4q13 |
| Ectonucleoside triphosphate diphosphohydrolase 5 | ENTPD5 | Metabolism, | 14q24 |
| | | neucleotide | |
| Ectonucleotide | ENPP4 | Metabolism, nucleotide | 6p21.1 |
| pyrophosphatase/phosphodiesterase 4 | | | |
| Cisplatin resistance associated | MTMR11 | Metabolism, | 1q12-q21 |
| | | phospholipid | |
| aAcyl-Coenzyme A oxidase 1, palmitoyl | ACOX1 | Metabolism, | 17q24-q25 |
| | | prostaglandin | |
| Neural precursor cell expressed, developmentally | NEDD4L | Metabolism, ubiquitin- | 18q21 |
| down-regulated 4-like | | protein/ | |
| | | sodium transport | |
| Tetraspanin 7 (transmembrane 4 superfamily, 2) | TSPAN7 | N-linked glycosylation | Xp11.4 |
| Protein tyrosine phosphatase, receptor type, R | PTPRR | Protein | 12q15 |
| | | dephosphorylation | |
| Vacuolar protein sorting 13A (yeast) | VPS13A | Protein localization | 9q21 |
| Procollagen-lysine, 2-oxoglutarate 5-dioxygenase 2 | PLOD2 | Protein modification | 3q23-q24 |
| Dual-specificity tyrosine-(Y)-phosphorylation | DYRK2 | Protein phosphorylation | 12q15 |
| regulated kinase 2 | | | |
| Guanylate cyclase activator 2A (guanylin) | GUCA2A | Intestinal chloride | 1p35-p34 |
| | | secretion | |
| Guanylate cyclase activator 2B (uroguanylin) | GUCA2B | Intestinal chloride | 1p34-p33 |
| | | secretion | |
| Sorcin | SRI | Electrolyte transport | 7q21.1 |
| | | (muscle) | |
| Endothelin 3 | EDN3 | vasoconstriction | 20q13.2-q13.3 |
| Peroxiredoxin 6 | PRDX6 | Response to oxidative | 1q25.1 |
| | | stress | |
| Selenium binding protein 1 | SELENBP1 | Selenium binding | 1q21-q22 |
| A kinase (PRKA) anchor protein (yotiao) 9 | AKAP9 | Signal transduction | 7q21-q22 |
| Phosphoinositide-3-kinase, regulatory subunit, | PIK3R1 | Signal transduction | 5q13.1 |
| polypeptide 1 (p85 alpha) For Peer Review | | | |
| Coagulation factor II (thrombin) receptor-like 1 | F2RL1 | Vascular signal | 5q13 |
| | | transduction | |
| Lectin, galactoside-binding, soluble, 2 (galectin | LGALS2 | Intestinal T cell | 22q13.1 |
| 2) | | regulation | |
| Chromodomain helicase DNA binding protein 1 | CHD1 | Transcription regulation | 5q15-q21 |
| Hepatocyte nuclear factor 4, gamma | HNF4G | Transcription regulation | 8q21.11 |
| Myeloid/lymphoid or mixed-lineage leukemia | MLLT2 | Transcription regulation | 4q21 |
| (trithorax homolog, Drosophila); translocated to, 2 | | | |
| v-myb myeloblastosis viral oncogene homolog | MYB | Transcription regulation | 6q22-q23 |
| (avian) | | | |
| Nuclear receptor subfamily 3, group C, member 2 | NR3C2 | Transcription regulation | 4q31.1 |
| SATB family member 2 | SATB2 | Transcription regulation | 2q33 |
| Zinc finger protein 217 | ZNF217 | Transcription regulation | 20q13.2 |
| Cyclin T2 | CCNT2 | Transcription regulation | 2q21.3 |
| Kruppel-like factor 5 (intestinal) | KLF5 | Transcription regulation | 13q22.1 |
| ATPase, Ca++ transporting, plasma membrane 1 | ATP2B1 | Transport, calcium | 12q21.3 |
| Exophilin 5 | EXPH5 | Transport, protein | 11q22.3 |
| Solute carrier family 16, member 1 | SLC16A1 | Transport, organic | 1p12 |
| | | anion | |
| Secretory carrier membrane protein 1 | SCAMP1 | Transport, protein | 5q13.3-q14.1 |
| Transportin 1 | TNPO1 | Transport, protein | 5q13.2 |
| Solute carrier family 26, member 2 | SLC26A2 | Transport, sulfate | 5q31-q34 |
| Aquaporin 8 | AQP8 | Transport, water | 16p12 |
| Peptidyl arginine deiminase, type II | — | Unknown | 1p35.2-p35.1 |
| Cordon-bleu homolog (mouse) | COBL | Unknown | 7p12.1 |
| Family with sequence similarity 8, member A1 | FAM8A1 | Unknown | 6p22-p23 |
| Hypothetical protein FLJ13910 | FLJ13910 | Unknown | 2p11.2 |
| GRP1-binding protein GRSP1(FERM domain | FRMD4B | Unknown | 13p14.1 |
| containing 4B) | | | |
| Histone 1, H4c | HIST1H4C | Unknown | 6p21.13 |
| Hepatocellular carcinoma antigen gene 520 | LOC63928 | Unknown | 16p12.1 |
| Hypothetical protein LOC92482 | LOC92482 | Unknown | 10q24 |
| FLJ11220 (round spermatid basic protein 1) | RSBN1 | Unknown | 1p13.2 |

[0427] Validation of Selected Microarray Results

[0428] Real-time RT-PCR was used to quantify expression of PSME2, PSMB8, ADM, STAT3, CXCL1 and DMBT in individual biopsy samples to validate selected microarray results. In agreement with the microarray data, the qRT-PCR indicated elevated expression of PSME2, PSMB8, ADM and STAT3 in CD affected biopsies compared to normal controls. The qRT-pCR also indicated elevated PSMB2 mRNA in UC samples while the microarray results had not shown significant over expression of this gene in UC. The CXCL1 and DMBT1 mRNA increased in both CD and UC affected compared to healthy control, confirming the microarray data (FIG. 16).

[0429] The microarray data indicated that TAP1 (Transporter 1, ATP-binding cassette, sub-family B) was over expressed in CD affected tissues. We further confirmed increase in the TAP1 protein by immunohistochemistry on colon sections (FIG. 17). The results demonstrated more TAP1-positive cells in CD, than in healthy colon biopsy tissue. Furthermore, the TAP1 protein immunostaining was predominantly associated with intestinal macrophages (FIG. 17, arrows), and some crypt epithelial cells in the CD affected biopsy tissues (FIG. 17, arrowhead).

### Genes Differentially Expressed in Unaffected IBD Biopsies Compared to Controls

[0430] Gene expression patterns of unaffected CD and UC biopsies were compared to normal control samples to identify changes that may reflect systemic processes in patients, or early pathogenic changes that may precede well established disease status as seen in affected areas. SAM analysis revealed approximately 44 differentially expressed genes in the unaffected IBD biopsy samples compared to normal controls. Interestingly, all except two were down regulations compared to normal controls as seen in the heat image of average gene expression (FIG. 18). The down regulations were seen mostly in UC, except CD33, CD45 and CD48 where similar down regulations were observed. The down regulated genes cover a broad range of cell maintenance functions, such as cell polarity, cell adhesion, regulation of transcription, RNA processing, ion transport and protein trafficking. Some of these were also down regulated in UC affected biopsies and noted previously in resected colonic tissue from UC cases. Only two genes, PSKH1 and PPID (peptidyl prolyl isomerase D or cyclophilinD), were significantly over expressed in all unaffected IBD biopsies. These were also over expressed in all IBD affected samples. PSKH1 is a protein serine kinase, involved in the trafficking and processing of pre-mRNA. Cyclophillin D is a mitochondrial matrix pore protein that helps to suppress apoptosis. The biological implications of their over expression in IBD are unclear at this time.

[0431] This study elucidated global gene expression patterns of Crohn's disease, ulcerative colitis and two control groups, non-IBD infectious colitis and healthy individuals, using single endoscopic pinch biopsies. Duplicate sampling of the same diseased area of a CD patient indicated the expression patterns to be reproducible and representative of the local diseased area. Unsupervised multidimensional scaling (MDS) of all 36 expression profiles indicated that IBD biopsies were indeed different enough for these to be separated from healthy controls. The fact that the two affected samples from CD76, taken from the same affected area, appear close together in the MDS plot, is a further validation that this method of unsupervised classification is effective, and truly based on gene expression similarities and differences. Infectious colitis was separated from UC and CD affected biopsies, and clearly separated from normal controls and unaffected IBD biopsy samples along component 2. While most CD cases clustered close together in the MDS plot, two CD cases (CD33 and 53) were grouped with UC samples, underscoring the heterogeneous nature of CD. These two CD cases resembled UC, were ANCA-positive²¹ (data not shown) and defined as having high inflammation by histology. The unsupervised multidimensional scaling strategy allows unbiased clustering of samples based on gene expression, and shows the promise of distinguishing active Crohn's and ulcerative colitis tissues from infectious colitis, inactive disease and healthy controls. This approach used on sufficient numbers of cases can ultimately lead to well-defined subgroups and distinguishing subsets of genes and biomarkers.

[0432] Following a supervised clustering approach, SAM analysis of each predefined group, UC, CD and infectious colitis (INF) provided some insights into gene expression similarities and dissimilarities between these disease types. Comparing differentially expressed genes in Crohn's and ulcerative colitis, 25/47 or 53% of genes up regulated in CD were also elevated in UC, while 25/51 or 49% of UC-over expressed genes were over expressed in CD. Only 11% (5/47) and 8% (4/51) of these were shared by INF. Among genes down regulated in CD, 18/30 or 60% were also down regulated in UC, while 18/81 or 22% of UC down regulated genes were shared by the CD down regulated profile. In general, many more genes were down regulated in UC than CD, also noted in our previous study of resected tissues⁵. Furthermore, 25% of the genes down regulated in UC were also down regulated in INF and may be reflective of changes underlying common pathogenic mechanisms in inflammation and diarrhea.

[0433] The gene expression differences observed between CD and UC speak of distinct biological processes contributing to their pathogenesis. In CD the preferential over expression of interferon γ inducible genes, IFITM1 and IFITM3, as well as STAT1 and STAT3 is indicative of an active TH1 pathway mediated by IL12, IL23 and IFNγ. A recent animal model study indicated a role for IL23 in local intestinal inflammation and colitis,²² while a genome-wide association study identified a significant association between CD and IL23 variants²³. The gene expression profiles can further help to identify specific IL23 responsive regulators of intestinal inflammation in CD. Other over expressed genes in CD consist of the MHC class I antigen processing pathway, such as the immunoproteasome subunit genes (PSME2, PSMB8, PSMB9, PSMB10) that degrade cellular proteins and antigens, and TAP1 encoding the MHC class I transporter associated with antigen processing.²⁴ The UC gene expression pattern is dominated by loss of expression of many genes that regulate metabolism, biosynthesis and electrolyte transport. We speculate that functional loss of specific transcription factors (CCNT2, CHD1, HNF4G, KLF5, MLLT2, MYB, NR3C2, SATB and ZNF217) may play a role in these down regulations. Nuclear receptor superfamily members such as pregnane X receptor (PXR) and the constitutive androstane receptor (CAR) are known to regulate genes required for xenobiotic metabolism and detoxification.^{25, 26} In a study of biopsies taken from surgically removed samples it was proposed that down regulation of PXR in epithelial cells may be responsible for down regulation of several electrolyte transport related genes in UC.⁹ ABCB1/MDR1, in particular has generated some interest in IBD; it was reported as preferentially decreased in UC,⁹ while a genetic study using the gene-wide haplotype tagging approach suggested contribution of ABCB1 variants in UC susceptibility.²⁷ However, in our previous study and the current gene expression pattern of endoscopic biopsy samples, ABCB1 was found to be down regulated in both UC and CD.

[0434] One major difference between our earlier study on surgically resected specimen⁵ and the current one is that, in the earlier study we had identified far fewer over expressions for CD. We speculate that surgery in Crohn's disease may occur at a relatively late stage of disease when many genes may be quiescent. In fact several genes detected as over expressed in UC and not CD in that study, were found to be over expressed in CD as well in the current biopsy study, such as, HLA-DRB1, HLA-DMA, LCN2. However, in general many differences noted between CD and UC in our earlier study remained uncontested by the current biopsy study. For example, several immunoglobulin gene transcripts were detected in UC specifically in both studies. When we compared our biopsy gene expression patterns with those of another recent study of endoscopic mucosal biopsy,¹⁴ there were few matches in actual genes identified (BF, NOS2A, TIMP1, upregulated and SLC26A2 down regulated in UC). That study also showed fewer overlaps with other previous IBD gene expression studies. This could be due to the fact that their study used in-house generated cDNA microarrays while many of the studies discussed including ours used high density oligonucleotide microarrays.

[0435] A strong motivation for all gene expression studies of complex, heterogeneous diseases like CD and UC, is to complement family-based genetic studies. Baseline expression levels of many genes show familial aggregation.²⁸ Thus, segregation analysis of gene expression data like ours may lead to master regulators of these expression differences that could form the basis of complex diseases like IBD. Second, conventional genome-wide scans have identified numerous IBD susceptibility regions.²⁹⁻³² The finding of candidate genes within these areas by gene expression profiling can lead to identification of disease-susceptibility genes. Potential candidate genes from the expression study include apoptosis-regulating CASP10 at 2q33-34, and antigen-presenting gene PSME2 at 14q11.2 (locus IBD4) from CD profiles, as well as immune response gene IFI30 (19p13.1, IBD6) and Notch-signaling NOTCH3 (19p13.2-p13.1, IBD6) from the UC profiles. With respect to the IBD3 locus at 6p21, 33 HLA-DMA, HLA-DRB1, TAP1, UBD and PSMB8 at 6p21.3, are particularly intriguing.

### REFERENCES

[0436] 1. Blumberg R S, Strober W. Prospects for research in inflammatory bowel disease. Jama 2001; 285:643-7.
[0437] 2. Fiocchi C. Inflammatory bowel disease: etiology and pathogenesis. Gastroenterology 1998; 115:182-205.
[0438] 3. Podolsky D K. Inflammatory bowel disease. N Engl J Med 2002; 347:417-29.
[0439] 4. Sartor R. Insights into the pathogenesis of inflammatory bowel diseases provided by new rodent models of spontaneous colitis. Inflammatory Bowel Diseases 1995; 1:64-75.
[0440] 5. Lawrance I C, Fiocchi C, Chakravarti S. Ulcerative colitis and Crohn's disease: distinctive gene expression profiles and novel susceptibility candidate genes. Hum Mol Genet 2001; 10:445-56.
[0441] 6. Dieckgraefe B, Stenson W, JR Korzenik, Swanson P, Harrington C. Analysis of mucosal gene expression in inflammatory bowel disease by parallel oligonucleotide arrays. Physiol Genomics 2000; 4:1-11.
[0442] 7. Uthoff S M, Eichenberger M R, Lewis R K, Fox M P, Hamilton C J, McAuliffe T L, Grimes H L, Galandiuk S. Identification of candidate genes in ulcerative colitis and Crohn's disease using cDNA array technology. Int J Oncol 2001; 19:803-10.
[0443] 8. Dooley T P, Curto E V, Reddy S P, Davis R L, Lambert G W, Wilborn T W, Elson C O. Regulation of gene expression in inflammatory bowel disease and correlation with IBD drugs: screening by DNA microarrays. Inflamm Bowel Dis 2004; 10:1-14.
[0444] 9. Langmann T, Moehle C, Mauerer R, Scharl M, Liebisch G, Zahn A, Stremmel W, Schmitz G. Loss of detoxification in inflammatory bowel disease: dysregulation of pregnane X receptor target genes. Gastroenterology 2004; 127:26-40.
[0445] 10. Bayless T M, Tokayer A Z, Polito J M, 2nd, Quaskey S A, Mellits E D, Harris M L. Crohn's disease: concordance for site and clinical type in affected family members—potential hereditary influences. Gastroenterology 1996; 111:573-9.
[0446] 11. Podolsky D K. Inflammatory bowel disease (1). N Engl J Med 1991; 325:928-37.
[0447] 12. Picco M F, Bayless T M. Prognostic consideration in idiopathic inflammatory bowel disease. In: Kirsner J B, ed. Inflammatory Bowel Disease. 5th ed. Philadelphia: WB Saunders, 2000:765-780.
[0448] 13. Hommes D W, van Deventer S J. Endoscopy in inflammatory bowel diseases. Gastroenterology 2004; 126:1561-73.
[0449] 14. Costello C M, Mah N, Hasler R, Rosenstiel P, Waetzig G H, Hahn A, Lu T, Gurbuz Y, Nikolaus S, Albrecht M, Hampe J, Lucius R, Kloppel G, Eickhoff H, Lehrach H, Lengauer T, Schreiber S. Dissection of the inflammatory bowel disease transcriptome using genome-wide cDNA microarrays. PLoS Med 2005; 2:e199.
[0450] 15. Colombel J F, Grandbastien B, Gower-Rousseau C, Plegat S, Evrard J P, Dupas J L, Gendre J P, Modigliani R, Belaiche J, Hostein J, Hugot J P, van Kruiningen H, Cortot A. Clinical characteristics of Crohn's disease in 72 families. Gastroenterology 1996; 111:604-7.
[0451] 16. Li C, Wong W H. Model-based analysis of oligonucleotide arrays: expression index computation and outlier detection. Proc Natl Acad Sci USA 2001; 98:31-6.
[0452] 17. Torgerson W S. Theory and Methods of Scaling. Wiley, 1958.
[0453] 18. Taguchi Y H, Oono Y. Relational patterns of gene expression via non-metric multidimensional scaling analysis. Bioinformatics 2005; 21:730-40.
[0454] 19. Tusher V G, Tibshirani R, Chu G. Significance analysis of microarrays applied to the ionizing radiation response. Proc Natl Acad Sci USA 2001; 98:5116-21.
[0455] 20. Bates M D, Erwin C R, Sanford L P, Wiginton D, Bezerra J A, Schatzman L C, Jegga A G, Ley-Ebert C, Williams S S, Steinbrecher K A, Warner B W, Cohen M B, Aronow B J. Novel genes and functional relationships in the adult mouse gastrointestinal tract identified by microarray analysis. Gastroenterology 2002; 122:1467-82.
[0456] 21. Vasiliauskas E A, Kam L Y, Karp L C, Gaiennie J, Yang H, Targan S R. Marker antibody expression stratifies Crohn's disease into immunologically homogeneous subgroups with distinct clinical characteristics. Gut 2000; 47:487-96.
[0457] 22. Uhlig H H, McKenzie B S, Hue S, Thompson C, Joyce-Shaikh B, Stepankova R, Robinson N, Buonocore S, Tlaskalova-Hogenova H, Cua D J, Powrie F. Differential activity of IL-12 and IL-23 in mucosal and systemic innate immune pathology. Immunity 2006; 25:309-18.
[0458] 23. Duerr R H, Taylor K D, Brant S R, Rioux J D, Silverberg M S, Daly M J, Steinhart A H, Abraham C, Regueiro M, Griffiths A, Dassopoulos T, Bitton A, Yang H, Targan S, Datta L W, Kistner E O, Schumm L P, Lee A, Gregersen P K, Barmada M M, Rotter J I, Nicolae D L, Cho J H. A Genome-Wide Association Study Identifies IL23R as an Inflammatory Bowel Disease Gene. Science 2006.
[0459] 24. Begley G S, Horvath A R, Taylor J C, Higgins C F. Cytoplasmic domains of the transporter associated with antigen processing and P-glycoprotein interact with subunits of the proteasome. Mol Immunol 2005; 42:137-41.
[0460] 25. Waxman D J. P450 gene induction by structurally diverse xenochemicals: central role of nuclear receptors CAR, PXR, and PPAR. Arch Biochem Biophys 1999; 369:11-23.
[0461] 26. Maglich J M, Stoltz C M, Goodwin B, Hawkins-Brown D, Moore J T, Kliewer S A. Nuclear pregnane x receptor and constitutive androstane receptor regulate overlapping but distinct sets of genes involved in xenobiotic detoxification. Mol Pharmacol 2002; 62:638-46.
[0462] 27. Ho G T, Soranzo N, Nimmo E R, Tenesa A, Goldstein D B, Satsangi J. ABCB1/MDR1 gene determines susceptibility and phenotype in ulcerative colitis: discrimination of critical variants using a gene-wide haplotype tagging approach. Hum Mol Genet 2006; 15:797-805.
[0463] 28. Morley M, Molony C M, Weber T M, Devlin J L, Ewens K G, Spielman R S, Cheung V G. Genetic analysis of genome-wide variation in human gene expression. Nature 2004; 430:743-7.
[0464] 29. Satsangi J, Parkes M, Louis E, Hashimoto L, Kato N, Welsh K, Terwilliger J, Lathrop G, Bell J, Jewell D. Two stage genome-wide search in inflammatory bowel disease provides evidence for susceptibility loci on chromosome 3, 7 and 12. Nature Genet 1996; 14:199-202.
[0465] 30. Hugot J P, Thomas G. Genome-wide scanning in inflammatory bowel diseases. Dig Dis 1998; 16:364-9.
[0466] 31. Cho J, Nicolae D, Gold L, Fields C, LaBuda M, Rohal P, Pickles M, Qin L, Fu Y, Mann J, Kirschner B, Jabs E, Weber J, Hanauer S, Bayless T, Brant S. Identification of novel susceptibility loci for inflammatory bowel disease on chromosomes 1p, 3q, and 4q: evidence for epistasis between 1p and IBD1. Proc Natl Acad Sci USA 1998; 95:7502-7.
[0467] 32. Brant S R, Shugart Y Y. Inflammatory bowel disease gene hunting by linkage analysis: rationale, methodology, and present status of the field. Inflamm Bowel Dis 2004; 10:300-11.
[0468] 33. Hampe J, Shaw S, Saiz R, Leysens N, Lantermann A, Mascheretti S, Lynch N, MacPherson A, Bridger S, Deventer S v, Stokkers P, Morin P, Mirza M, Forbes A, Lennard-Jones J, Mathew C, Curran M, Schreiber S. Linkage of inflammatory bowel disease to human chromosome 6p. Am. J. Hum. Genet. 1999; 65:1647-1655.

[0469] A number of embodiments of the invention have been described. Nevertheless, it will be understood that various modifications may be made without departing from the spirit and scope of the invention. Accordingly, other embodiments are within the scope of the following claims.

The application's sequence listing, which the Patent Office published only in electronic form, follows.

SEQUENCE LISTING (1318 sequences)

SEQ ID NO: 1 - DNA, 547 bp, Homo sapiens
tcagctcttgcaagaggactccctcaatgtggctgacttgacttccctccgggccccactggacatccccatcccagaccctccacccaaggatgatgagatggaaacagataagcaggagaagaaagaagtccctaagtgtggatttctccctgggaatgagaaagtcctgtccctgcttgccctggttaagccagaagtctggactctcaaagagaaatgcattctggtgattacatggatccaacacctgatccccaagattgaagatggaaatgattttggggtagcaatccaggagaaggtgctggagagggtgaatgccgtcaagaccaaagtggaagctttccagacaaccatttccaagtacttctcagaacgtggggatgctgtggccaaggcctccaaggagactcatgtaatggattaccgggccttggtgcatgagcgagatgaggcagcctatggggagctcagggccatggtgctggacctgagggccttctatgctgagctttatcatatcatcagcagcaacctggagaaa

SEQ ID NO: 2 - DNA, 25 bp, Artificial Sequence
  Description of Artificial Sequence: Synthetic probe
tcagctcttgcaagaggactccctc

SEQ ID NO: 3 - DNA, 25 bp, Artificial Sequence
  Description of Artificial Sequence: Synthetic probe
agaggactccctcaatgtggctgac

SEQ ID NO: 4 - DNA, 25 bp, Artificial Sequence
  Description of Artificial Sequence: Synthetic probe
agtctggactctcaaagagaaatgc

SEQ ID NO: 5 - DNA, 25 bp, Artificial Sequence
  Description of Artificial Sequence: Synthetic probe
cattctggtgattacatggatccaa

SEQ ID NO: 6 - DNA, 25 bp, Artificial Sequence
  Description of Artificial Sequence: Synthetic probe
gatccaacacctgatccccaagatt

SEQ ID NO: 7 - DNA, 25 bp, Artificial Sequence
  Description of Artificial Sequence: Synthetic probe
agcaatccaggagaaggtgctggag

SEQ ID NO: 8 - DNA, 25 bp, Artificial Sequence
  Description of Artificial Sequence: Synthetic probe
gtacttctcagaacgtggggatgct

SEQ ID NO: 9 - DNA, 25 bp, Artificial Sequence
  Description of Artificial Sequence: Synthetic probe
caaggcctccaaggagactcatgta

SEQ ID NO: 10 - DNA, 25 bp, Artificial Sequence
  Description of Artificial Sequence: Synthetic probe
ttaccgggccttggtgcatgagcga

SEQ ID NO: 11 - DNA, 25 bp, Artificial Sequence
  Description of Artificial Sequence: Synthetic probe
agatgaggcagcctatggggagctc

SEQ ID NO: 12 - DNA, 25 bp, Artificial Sequence
  Description of Artificial Sequence: Synthetic probe
catggtgctggacctgagggccttc

SEQ ID NO: 13 - DNA, 25 bp, Artificial Sequence
  Description of Artificial Sequence: Synthetic probe
cctgagggccttctatgctgagctt

SEQ ID NO: 14 - DNA, 25 bp, Artificial Sequence
  Description of Artificial Sequence: Synthetic probe
ggccttctatgctgagctttatcat

SEQ ID NO: 15 - DNA, 25 bp, Artificial Sequence
  Description of Artificial Sequence: Synthetic probe
tgagctttatcatatcatcagcagc

SEQ ID NO: 16 - DNA, 25 bp, Artificial Sequence
  Description of Artificial Sequence: Synthetic probe
ttatcatatcatcagcagcaacctg

SEQ ID NO: 17 - DNA, 25 bp, Artificial Sequence
  Description of Artificial Sequence: Synthetic probe
tatcatcagcagcaacctggagaaa

SEQ ID NO: 18 - DNA, 517 bp, Homo sapiens
tgttgctctatgagatgctctgtggtcacgcgccttttgaggcagagaatgaagatgacctctttgaggccatactgaatgatgaggtggtctaccctacctggctccatgaagatgccacagggatcctaaaatctttcatgaccaagaaccccaccatgcgcttgggcagcctgactcagggaggcgagcacgccatcttgagacatcctttttttaaggaaatcgactgggcccagctgaaccatcgccaaatagaaccgcctttcagacccagaatcaaatcccgagaagatgtcagtaattttgaccctgacttcataaaggaagagccagttttaactccaattgatgagggacatcttccaatgattaaccaggatgagtttagaaacttttcctatgtgtctccagaattgcaaccatagccttatggggagtgagagagagggcacgagaacccaaaggaatagagattctccaggaatttcctctatcggaccttcccagcatcagc

SEQ ID NO: 19 - DNA, 25 bp, Artificial Sequence
  Description of Artificial Sequence: Synthetic probe
tgttgctctatgagatgctctgtgg

SEQ ID NO: 20 - DNA, 25 bp, Artificial Sequence
  Description of Artificial Sequence: Synthetic probe
tctatgagatgctctgtggtcacgc

SEQ ID NO: 21 - DNA, 25 bp, Artificial Sequence
  Description of Artificial Sequence: Synthetic probe
agatgctctgtggtcacgcgccttt

SEQ ID NO: 22 - DNA, 25 bp, Artificial Sequence
  Description of Artificial Sequence: Synthetic probe
cgccttttgaggcagagaatgaaga

SEQ ID NO: 23 - DNA, 25 bp, Artificial Sequence
  Description of Artificial Sequence: Synthetic probe
tctttgaggccatactgaatgatga

SEQ ID NO: 24 - DNA, 25 bp, Artificial Sequence
  Description of Artificial Sequence: Synthetic probe
tctaccctacctggctccatgaaga

SEQ ID NO: 25 - DNA, 25 bp, Artificial Sequence
  Description of Artificial Sequence: Synthetic probe
ctacctggctccatgaagatgccac

SEQ ID NO: 26 - DNA, 25 bp, Artificial Sequence
  Description of Artificial Sequence: Synthetic probe
ggctccatgaagatgccacagggat

SEQ ID NO: 27 - DNA, 25 bp, Artificial Sequence
  Description of Artificial Sequence: Synthetic probe
atgaagatgccacagggatcctaaa

SEQ ID NO: 28 - DNA, 25 bp, Artificial Sequence
  Description of Artificial Sequence: Synthetic probe
gcgagcacgccatcttgagacatcc

SEQ ID NO: 29 - DNA, 25 bp, Artificial Sequence
  Description of Artificial Sequence: Synthetic probe
ctccaattgatgagggacatcttcc

SEQ ID NO: 30 - DNA, 25 bp, Artificial Sequence
  Description of Artificial Sequence: Synthetic probe
atcttccaatgattaaccaggatga

SEQ ID NO: 31 - DNA, 25 bp, Artificial Sequence
  Description of Artificial Sequence: Synthetic probe
tttcctatgtgtctccagaattgca

SEQ ID NO: 32 - DNA, 25 bp, Artificial Sequence
  Description of Artificial Sequence: Synthetic probe
atgtgtctccagaattgcaaccata

SEQ ID NO: 33 - DNA, 25 bp, Artificial Sequence
  Description of Artificial Sequence: Synthetic probe
ctccagaattgcaaccatagcctta

SEQ ID NO: 34 - DNA, 25 bp, Artificial Sequence
  Description of Artificial Sequence: Synthetic probe
tctatcggaccttcccagcatcagc

SEQ ID NO: 35 - DNA, 588 bp, Homo sapiens
aaagtgctcggagagctcggacagcggctccgggttctggaaggccctgaccttcatggccgtcggaggaggactcgcagtcgccgggctgcccgcgctgggcttcaccggcgccggcatcgcggccaactcggtggctgcctcgctgatgagctggtctgcgatcctgaatgggggcggcgtgcccgccggggggctagtggccacgctgcagagcctcggggctggtggcagcagcgtcgtcataggtaatattggtgccctgatgcggtacgccacccacaagtatctcgatagtgaggaggatgaggagtagccagcagctcccagaacctcttcttccttcttggcctaactcttccagttaggatctagaactttgcctttttttttttttttttttttttttgagatgggttctcactatattgtccaggctagagtgcagtggctattcacagatgcgaacatagtacactgcagcctccaactcctagcctcaagtgatcctcctgtctcaacctcccaagtaggattacaagcatgcgccgacgatgcccagaatccagaactttgtctatcactctc

SEQ ID NO: 36 - DNA, 25 bp, Artificial Sequence
  Description of Artificial Sequence: Synthetic probe
aaagtgctcggagagctcggacagc

SEQ ID NO: 37 - DNA, 25 bp, Artificial Sequence
  Description of Artificial Sequence: Synthetic probe
ttctggaaggccctgaccttcatgg

SEQ ID NO: 38 - DNA, 25 bp, Artificial Sequence
  Description of Artificial Sequence: Synthetic probe
gccggcatcgcggccaactcggtgg

SEQ ID NO: 39 - DNA, 25 bp, Artificial Sequence
  Description of Artificial Sequence: Synthetic probe
gcctcgctgatgagctggtctgcga

SEQ ID NO: 40 - DNA, 25 bp, Artificial Sequence
  Description of Artificial Sequence: Synthetic probe
ctggtggcagcagcgtcgtcatagg

SEQ ID NO: 41 - DNA, 25 bp, Artificial Sequence
  Description of Artificial Sequence: Synthetic probe
cagcgtcgtcataggtaatattggt

SEQ ID NO: 42 - DNA, 25 bp, Artificial Sequence
  Description of Artificial Sequence: Synthetic probe
tattggtgccctgatgcggtacgcc

SEQ ID NO: 43 - DNA, 25 bp, Artificial Sequence
  Description of Artificial Sequence: Synthetic probe
caagtatctcgatagtgaggaggat

SEQ ID NO: 44 - DNA, 25 bp, Artificial Sequence
  Description of Artificial Sequence: Synthetic probe
cccagaacctcttcttccttcttgg

SEQ ID NO: 45 - DNA, 25 bp, Artificial Sequence
  Description of Artificial Sequence: Synthetic probe
tccttcttggcctaactcttccagt

SEQ ID NO: 46 - DNA, 25 bp, Artificial Sequence
  Description of Artificial Sequence: Synthetic probe
cctaactcttccagttaggatctag

SEQ ID NO: 47 - DNA, 25 bp, Artificial Sequence
  Description of Artificial Sequence: Synthetic probe
ggctattcacagatgcgaacatagt

SEQ ID NO: 48 - DNA, 25 bp, Artificial Sequence
  Description of Artificial Sequence: Synthetic probe
ctcaacctcccaagtaggattacaa

SEQ ID NO: 49 - DNA, 25 bp, Artificial Sequence
  Description of Artificial Sequence: Synthetic probe
atgcgccgacgatgcccagaatcca

SEQ ID NO: 50 - DNA, 25 bp, Artificial Sequence
  Description of Artificial Sequence: Synthetic probe
gatgcccagaatccagaactttgtc

SEQ ID NO: 51 - DNA, 25 bp, Artificial Sequence
  Description of Artificial Sequence: Synthetic probe
atccagaactttgtctatcactctc

SEQ ID NO: 52 - DNA, 361 bp, Homo sapiens
ttttcctagatattgcacgggagaatatacaaatagcaaaattgggccaagggccaagagaatatccgaactttaatttcaggaattgaatgggtttgctagaatgtgatatttgaagcatcacataaaaatgatgggacaataaattttgccataaagtcaaatttagctggaaatcctggatttttttctgttaaatctggcaaccctagtctgctagccaggatccacaagtccttgttccactgtgccttggtttctcctttatttctaagtggaaaaagtattagccaccatcttacctcacagtgatgttgtgaggacatgtggaagcactttaagttttttcatcataacataa

SEQ ID NO: 53 - DNA, 25 bp, Artificial Sequence
  Description of Artificial Sequence: Synthetic probe
ttttcctagatattgcacgggagaa

SEQ ID NO: 54 - DNA, 25 bp, Artificial Sequence
  Description of Artificial Sequence: Synthetic probe
tatccgaactttaatttcaggaatt

SEQ ID NO: 55 - DNA, 25 bp, Artificial Sequence
  Description of Artificial Sequence: Synthetic probe
aatgggtttgctagaatgtgatatt

SEQ ID NO: 56 - DNA, 25 bp, Artificial Sequence
  Description of Artificial Sequence: Synthetic probe
ttttgccataaagtcaaatttagct

SEQ ID NO: 57 - DNA, 25 bp, Artificial Sequence
  Description of Artificial Sequence: Synthetic probe
ttttctgttaaatctggcaacccta

SEQ ID NO: 58 - DNA, 25 bp, Artificial Sequence
  Description of Artificial Sequence: Synthetic probe
ttaaatctggcaaccctagtctgct

SEQ ID NO: 59 - DNA, 25 bp, Artificial Sequence
  Description of Artificial Sequence: Synthetic probe
ctggcaaccctagtctgctagccag

SEQ ID NO: 60 - DNA, 25 bp, Artificial Sequence
  Description of Artificial Sequence: Synthetic probe
ccctagtctgctagccaggatccac

SEQ ID NO: 61 - DNA, 25 bp, Artificial Sequence
  Description of Artificial Sequence: Synthetic probe
gctagccaggatccacaagtccttg

SEQ ID NO: 62 - DNA, 25 bp, Artificial Sequence
  Description of Artificial Sequence: Synthetic probe
aggatccacaagtccttgttccact

SEQ ID NO: 63 - DNA, 25 bp, Artificial Sequence
  Description of Artificial Sequence: Synthetic probe
cacaagtccttgttccactgtgcct

SEQ ID NO: 64 - DNA, 25 bp, Artificial Sequence
  Description of Artificial Sequence: Synthetic probe
ccttgttccactgtgccttggtttc

SEQ ID NO: 65 - DNA, 25 bp, Artificial Sequence
  Description of Artificial Sequence: Synthetic probe
aaagtattagccaccatcttacctc

SEQ ID NO: 66 - DNA, 25 bp, Artificial Sequence
  Description of Artificial Sequence: Synthetic probe
agccaccatcttacctcacagtgat

SEQ ID NO: 67 - DNA, 25 bp, Artificial Sequence
  Description of Artificial Sequence: Synthetic probe
acatgtggaagcactttaagttttt

SEQ ID NO: 68 - DNA, 25 bp, Artificial Sequence
  Description of Artificial Sequence: Synthetic probe
tttaagttttttcatcataacataa

SEQ ID NO: 69 - DNA, 611 bp, Homo sapiens
acttcaccatgcaatttgtgtcttcctaaagagagctgtacccagagagtcctgtgctgaatgtggactcaatccctagggctggcagaaagggaacagaaaggtttttgagtacggctatagcctggactttcctgttgtctacaccaatgcccaactgcctgccttagggtagtgctaagaggatctcctgtccatcagccaggacagtcagctctctcctttcagggccaatccccagcccttttgttgagccaggcctctctcacctctcctactcacttaaagcccgcctgacagaaaccacggccacatttggttctaagaaaccctctgtcattcgctcccacattctgatgagcaaccgcttccctatttatttatttatttgtttgtttgttttgattcattggtctaatttattcaaagggggcaagaagtagcagtgtctgtaaaagagcctagtttttaatagctatggaatcaattcaatttggactggtgtgctctctttaaatcaagtcctttaattaagactgaaaatatataagctcagattatttaaatgggaatatttataaatgagcaaatatcatactgttcaatggttc

SEQ ID NO: 70 - DNA, 25 bp, Artificial Sequence
  Description of Artificial Sequence: Synthetic probe
acttcaccatgcaatttgtgtcttc

SEQ ID NO: 71 - DNA, 25 bp, Artificial Sequence
  Description of Artificial Sequence: Synthetic probe
atttgtgtcttcctaaagagagctg

SEQ ID NO: 72 - DNA, 25 bp, Artificial Sequence
  Description of Artificial Sequence: Synthetic probe
tgtacccagagagtcctgtgctgaa

SEQ ID NO: 73 - DNA, 25 bp, Artificial Sequence
  Description of Artificial Sequence: Synthetic probe
gactcaatccctagggctggcagaa

SEQ ID NO: 74 - DNA, 25 bp, Artificial Sequence
  Description of Artificial Sequence: Synthetic probe
gctatagcctggactttcctgttgt

SEQ ID NO: 75 - DNA, 25 bp, Artificial Sequence
  Description of Artificial Sequence: Synthetic probe
ctttcctgttgtctacaccaatgcc

SEQ ID NO: 76 - DNA, 25 bp, Artificial Sequence
  Description of Artificial Sequence: Synthetic probe
cctgccttagggtagtgctaagagg

SEQ ID NO: 77 - DNA, 25 bp, Artificial Sequence
  Description of Artificial Sequence: Synthetic probe
gaggatctcctgtccatcagccagg

SEQ ID NO: 78 - DNA, 25 bp, Artificial Sequence
  Description of Artificial Sequence: Synthetic probe
tccatcagccaggacagtcagctct

SEQ ID NO: 79 - DNA, 25 bp, Artificial Sequence
  Description of Artificial Sequence: Synthetic probe
ttttgttgagccaggcctctctcac

SEQ ID NO: 80 - DNA, 25 bp, Artificial Sequence
  Description of Artificial Sequence: Synthetic probe
ttaaagcccgcctgacagaaaccac

SEQ ID NO: 81 - DNA, 25 bp, Artificial Sequence
  Description of Artificial Sequence: Synthetic probe
gaaaccacggccacatttggttcta

SEQ ID NO: 82 - DNA, 25 bp, Artificial Sequence
  Description of Artificial Sequence: Synthetic probe
taagaaaccctctgtcattcgctcc

SEQ ID NO: 83 - DNA, 25 bp, Artificial Sequence
  Description of Artificial Sequence: Synthetic probe
acattctgatgagcaaccgcttccc

SEQ ID NO: 84 - DNA, 25 bp, Artificial Sequence
  Description of Artificial Sequence: Synthetic probe
aatttggactggtgtgctctcttta

SEQ ID NO: 85 - DNA, 25 bp, Artificial Sequence
  Description of Artificial Sequence: Synthetic probe
caaatatcatactgttcaatggttc

SEQ ID NO: 86 - DNA, 612 bp, Homo sapiens
attcctgtctaaaatgaaggtacagcccaagcaccttgggtgtgttggactgagctgcttttatttggctgtaaaatcaatagaagaggaaaggaatgtcccattggcaactgacttgatccgaataagtcaatataggtttacggtttcagacttgatgagaatggaaaagattgtattggagaaggtgtgttggaaagtcaaagctactactgcctttcaatttctgcaactgtattattcactccttcaagagaacttgccacttgaaaggagaaatagcattaattttgaaagactagaagctcaactgaaggcatgtcattgcaggatcatattttctaaagcaaagccttctgtgttggcattgtctatcattgcattagagatccaagcacagaagtgtgtagagttaacagaaggaatagaatgtcttcagaaacattccaagataaatggcagagatctgaccttctggcaagagcttgtatccaaatgtttaactgaatattcatcaaataagtgttccaaaccaaatgttcagaagttgaaatggattgtttctgggcgtactgcacggcaattgaagcatagctactacagaataactca

SEQ ID NO: 87 - DNA, 25 bp, Artificial Sequence
  Description of Artificial Sequence: Synthetic probe
attcctgtctaaaatgaaggtacag

SEQ ID NO: 88 - DNA, 25 bp, Artificial Sequence
  Description of Artificial Sequence: Synthetic probe
aagcaccttgggtgtgttggactga

SEQ ID NO: 89 - DNA, 25 bp, Artificial Sequence
  Description of Artificial Sequence: Synthetic probe
aggaatgtcccattggcaactgact

SEQ ID NO: 90 - DNA, 25 bp, Artificial Sequence
  Description of Artificial Sequence: Synthetic probe
gcaactgacttgatccgaataagtc

SEQ ID NO: 91 - DNA, 25 bp, Artificial Sequence
  Description of Artificial Sequence: Synthetic probe
aaagctactactgcctttcaatttc

SEQ ID NO: 92 - DNA, 25 bp, Artificial Sequence
  Description of Artificial Sequence: Synthetic probe
ttcactccttcaagagaacttgcca

SEQ ID NO: 93 - DNA, 25 bp, Artificial Sequence
  Description of Artificial Sequence: Synthetic probe
gaacttgccacttgaaaggagaaat

SEQ ID NO: 94 - DNA, 25 bp, Artificial Sequence
  Description of Artificial Sequence: Synthetic probe
aggcatgtcattgcaggatcatatt

SEQ ID NO: 95 - DNA, 25 bp, Artificial Sequence
  Description of Artificial Sequence: Synthetic probe
aagcaaagccttctgtgttggcatt

SEQ ID NO: 96 - DNA, 25 bp, Artificial Sequence
  Description of Artificial Sequence: Synthetic probe
gttggcattgtctatcattgcatta

SEQ ID NO: 97 - DNA, 25 bp, Artificial Sequence
  Description of Artificial Sequence: Synthetic probe
gcattagagatccaagcacagaagt

SEQ ID NO: 98 - DNA, 25 bp, Artificial Sequence
  Description of Artificial Sequence: Synthetic probe
atgtcttcagaaacattccaagata

SEQ ID NO: 99 - DNA, 25 bp, Artificial Sequence
  Description of Artificial Sequence: Synthetic probe
gatctgaccttctggcaagagcttg

SEQ ID NO: 100 - DNA, 25 bp, Artificial Sequence
  Description of Artificial Sequence: Synthetic probe
attcatcaaataagtgttccaaacc

SEQ ID NO: 101 - DNA, 25 bp, Artificial Sequence
  Description of Artificial Sequence: Synthetic probe
tgggcgtactgcacggcaattgaag

SEQ ID NO: 102 - DNA, 25 bp, Artificial Sequence
  Description of Artificial Sequence: Synthetic probe
agcatagctactacagaataactca

SEQ ID NO: 103 - DNA, 564 bp, Homo sapiens
ctttcagctcaagagccagaagcgctatcacgaagatatctttggtgctgtatttccttacgaggcgaagaaggacagggtggcggtgcagcccagcagcctggagatgtcagcgctctgagggcctacaggaggggttaaagctgccggcacagaacttaaggatggagccagctctgcattatctgaggtcacagggcctggggagatggaggaaagtgatatcccccagcctcaagtcttatttcctcaacgttgctccccatcaagccctttacttgacctcctaacaagtagcaccctggattgatcggagcctcctctctcaaactggggcctccctggtcccttggagacaaaatcttaaatgccaggcctggcaagtgggtgaaagatggaacttgctgctgagtgcaccacttcaagtgaccaccaggaggtgctatcgcaccactgtgtatttaactgccttgtgtacagttatttatgcctctgtatttaaaaaactaacacccagtctgttccccatggccacttgggtcttccctgtatgattccttgatg

SEQ ID NO: 104 - DNA, 25 bp, Artificial Sequence
  Description of Artificial Sequence: Synthetic probe
ctttcagctcaagagccagaagcgc

SEQ ID NO: 105 - DNA, 25 bp, Artificial Sequence
  Description of Artificial Sequence: Synthetic probe
gaagcgctatcacgaagatatcttt

SEQ ID NO: 106 - DNA, 25 bp, Artificial Sequence
  Description of Artificial Sequence: Synthetic probe
ttggtgctgtatttccttacgaggc

SEQ ID NO: 107 - DNA, 25 bp, Artificial Sequence
  Description of Artificial Sequence: Synthetic probe
agatgtcagcgctctgagggcctac

SEQ ID NO: 108 - DNA, 25 bp, Artificial Sequence
  Description of Artificial Sequence: Synthetic probe
gccggcacagaacttaaggatggag

SEQ ID NO: 109 - DNA, 25 bp, Artificial Sequence
  Description of Artificial Sequence: Synthetic probe
gctctgcattatctgaggtcacagg

SEQ ID NO: 110 - DNA, 25 bp, Artificial Sequence
  Description of Artificial Sequence: Synthetic probe
caagtcttatttcctcaacgttgct

SEQ ID NO: 111 - DNA, 25 bp, Artificial Sequence
  Description of Artificial Sequence: Synthetic probe
ctttacttgacctcctaacaagtag

SEQ ID NO: 112 - DNA, 25 bp, Artificial Sequence
  Description of Artificial Sequence: Synthetic probe
aagtagcaccctggattgatcggag

SEQ ID NO: 113 - DNA, 25 bp, Artificial Sequence
  Description of Artificial Sequence: Synthetic probe
cccttggagacaaaatcttaaatgc

SEQ ID NO: 114 - DNA, 25 bp, Artificial Sequence
  Description of Artificial Sequence: Synthetic probe
gatggaacttgctgctgagtgcacc

SEQ ID NO: 115 - DNA, 25 bp, Artificial Sequence
  Description of Artificial Sequence: Synthetic probe
agtgcaccacttcaagtgaccacca

SEQ ID NO: 116 - DNA, 25 bp, Artificial Sequence
  Description of Artificial Sequence: Synthetic probe
accaccaggaggtgctatcgcacca

SEQ ID NO: 117 - DNA, 25 bp, Artificial Sequence
  Description of Artificial Sequence: Synthetic probe
caccactgtgtatttaactgccttg

SEQ ID NO: 118 - DNA, 25 bp, Artificial Sequence
  Description of Artificial Sequence: Synthetic probe
gccttgtgtacagttatttatgcct

SEQ ID NO: 119 - DNA, 25 bp, Artificial Sequence
  Description of Artificial Sequence: Synthetic probe
gtcttccctgtatgattccttgatg

SEQ ID NO: 120 - DNA, 131 bp, Homo sapiens
gaagaaggcactgtgctcagtgttggtggacaggtgaatttgctcatacagcaggccatagaccccaaaaatctcagccgacttttcccaggatggaaagcttgggtgtgatcttcagtatatgaattacc

SEQ ID NO: 121 - DNA, 25 bp, Artificial Sequence
  Description of Artificial Sequence: Synthetic probe
gaagaaggcactgtgctcagtgttg

SEQ ID NO: 122 - DNA, 25 bp, Artificial Sequence
  Description of Artificial Sequence: Synthetic probe
aggcactgtgctcagtgttggtgga

SEQ ID NO: 123 - DNA, 25 bp, Artificial Sequence
  Description of Artificial Sequence: Synthetic probe
actgtgctcagtgttggtggacagg

SEQ ID NO: 124 - DNA, 25 bp, Artificial Sequence
  Description of Artificial Sequence: Synthetic probe
agtgttggtggacaggtgaatttgc

SEQ ID NO: 125 - DNA, 25 bp, Artificial Sequence
  Description of Artificial Sequence: Synthetic probe
tgaatttgctcatacagcaggccat

SEQ ID NO: 126 - DNA, 25 bp, Artificial Sequence
  Description of Artificial Sequence: Synthetic probe
tttgctcatacagcaggccatagac

SEQ ID NO: 127 - DNA, 25 bp, Artificial Sequence
  Description of Artificial Sequence: Synthetic probe
atacagcaggccatagaccccaaaa

SEQ ID NO: 128 - DNA, 25 bp, Artificial Sequence
  Description of Artificial Sequence: Synthetic probe
agcaggccatagaccccaaaaatct

SEQ ID NO: 129 - DNA, 25 bp, Artificial Sequence
  Description of Artificial Sequence: Synthetic probe
atagaccccaaaaatctcagccgac

SEQ ID NO: 130 - DNA, 25 bp, Artificial Sequence
  Description of Artificial Sequence: Synthetic probe
gaccccaaaaatctcagccgacttt

SEQ ID NO: 131 - DNA, 25 bp, Artificial Sequence
  Description of Artificial Sequence: Synthetic probe
tctcagccgacttttcccaggatgg

SEQ ID NO: 132 - DNA, 25 bp, Artificial Sequence
  Description of Artificial Sequence: Synthetic probe
gacttttcccaggatggaaagcttg

SEQ ID NO: 133 - DNA, 25 bp, Artificial Sequence
  Description of Artificial Sequence: Synthetic probe
ttttcccaggatggaaagcttgggt

SEQ ID NO: 134 - DNA, 25 bp, Artificial Sequence
  Description of Artificial Sequence: Synthetic probe
gaaagcttgggtgtgatcttcagta

SEQ ID NO: 135 - DNA, 25 bp, Artificial Sequence
  Description of Artificial Sequence: Synthetic probe
gcttgggtgtgatcttcagtatatg

SEQ ID NO: 136 - DNA, 25 bp, Artificial Sequence
  Description of Artificial Sequence: Synthetic probe
tgtgatcttcagtatatgaattacc

SEQ ID NO: 137 - DNA, 533 bp, Homo sapiens
  modified_base (35)..(61): a, c, g, t, unknown or other
  modified_base (109)..(165): a, c, g, t, unknown or other
  modified_base (235)..(263): a, c, g, t, unknown or other
  modified_base (321)..(340): a, c, g, t, unknown or other
  modified_base (355)..(393): a, c, g, t, unknown or other
catggacctttttgtgactgtgtgcttcctgtttnnnnnnnnnnnnnnnnnnnnnnnnnnnaccctcaactactattccagctgtagaaaaccaaccaccacgaaaaannnnnnnnnnnnnnnnnnnnnnnnnnnnnnnnnnnnnnnnnnnnnnnnnnnnnnnnnacaagccccttccaactattccctcctggacatgaggccaccaccacctgcgatgatcactttaaacaannnnnnnnnnnnnnnnnnnnnnnnnnnnncctgtgtctatgagtgtctggatggcaaagactgtcagagcttcttctgctgctatgnnnnnnnnnnnnnnnnnnnntggaggaaagggcgnnnnnnnnnnnnnnnnnnnnnnnnnnnnnnnnnnnnnnnggtctttttccccacgtccttcctgctctttaacctggtctactgggttggatacctgtatctctaagtgttgctcagagtgaagagtgaagagcatttggtacacacttgaccttctgtcgtccccagaccagtagtga

SEQ ID NO: 138 - DNA, 25 bp, Artificial Sequence
  Description of Artificial Sequence: Synthetic probe
catggacctttttgtgactgtgtgc

SEQ ID NO: 139 - DNA, 25 bp, Artificial Sequence
  Description of Artificial Sequence: Synthetic probe
cctttttgtgactgtgtgcttcctg

SEQ ID NO: 140 - DNA, 25 bp, Artificial Sequence
  Description of Artificial Sequence: Synthetic probe
agctgtagaaaaccaaccaccacga

SEQ ID NO: 141 - DNA, 25 bp, Artificial Sequence
  Description of Artificial Sequence: Synthetic probe
gctgtagaaaaccaaccaccacgaa

SEQ ID NO: 142 - DNA, 25 bp, Artificial Sequence
  Description of Artificial Sequence: Synthetic probe
ctattccctcctggacatgaggcca

SEQ ID NO: 143 - DNA, 25 bp, Artificial Sequence
  Description of Artificial Sequence: Synthetic probe
tattccctcctggacatgaggccac

SEQ ID NO: 144 - DNA, 25 bp, Artificial Sequence
  Description of Artificial Sequence: Synthetic probe
cctgtgtctatgagtgtctggatgg

SEQ ID NO: 145 - DNA, 25 bp, Artificial Sequence
  Description of Artificial Sequence: Synthetic probe
tgtctggatggcaaagactgtcaga

SEQ ID NO: 146 - DNA, 25 bp, Artificial Sequence
  Description of Artificial Sequence: Synthetic probe
caaagactgtcagagcttcttctgc

SEQ ID NO: 147 - DNA, 25 bp, Artificial Sequence
  Description of Artificial Sequence: Synthetic probe
ctgtcagagcttcttctgctgctat

SEQ ID NO: 148 - DNA, 25 bp, Artificial Sequence
  Description of Artificial Sequence: Synthetic probe
tgtcagagcttcttctgctgctatg

SEQ ID NO: 149 - DNA, 25 bp, Artificial Sequence
  Description of Artificial Sequence: Synthetic probe
acgtccttcctgctctttaacctgg

SEQ ID NO: 150 - DNA, 25 bp, Artificial Sequence
  Description of Artificial Sequence: Synthetic probe
atacctgtatctctaagtgttgctc

SEQ ID NO: 151 - DNA, 25 bp, Artificial Sequence
  Description of Artificial Sequence: Synthetic probe
ctctaagtgttgctcagagtgaaga

SEQ ID NO: 152 - DNA, 25 bp, Artificial Sequence
  Description of Artificial Sequence: Synthetic probe
agagcatttggtacacacttgacct

SEQ ID NO: 153 - DNA, 25 bp, Artificial Sequence
  Description of Artificial Sequence: Synthetic probe
tctgtcgtccccagaccagtagtga

SEQ ID NO: 154 - DNA, 289 bp, Homo sapiens
  modified_base (171)..(187): a, c, g, t, unknown or other
ttctgggcctgctcacggcagtgccacctgccagctgtcagcaaggcctggggaaccttcagccctggatgcagggccttatcgcggtggccgtgttcctggtcctcgttgcaatcgcctttgcagtcaaccacttctggtgccaggaggagccggagcctgcacacatgnnnnnnnnnnnnnnnnncaaggcagatggagtcctggtgggaacagatggaaggtactcttcgatggcggccagtttcaggtccagtgagcatgagaatgcctatgagaatgtgcccga

SEQ ID NO: 155 - DNA, 25 bp, Artificial Sequence
  Description of Artificial Sequence: Synthetic probe
ttctgggcctgctcacggcagtgcc

SEQ ID NO: 156 - DNA, 25 bp, Artificial Sequence
  Description of Artificial Sequence: Synthetic probe
ggcagtgccacctgccagctgtcag

SEQ ID NO: 157 - DNA, 25 bp, Artificial Sequence
  Description of Artificial Sequence: Synthetic probe
agccctggatgcagggccttatcgc

SEQ ID NO: 158 - DNA, 25 bp, Artificial Sequence
  Description of Artificial Sequence: Synthetic probe
gccttatcgcggtggccgtgttcct

SEQ ID NO: 159 - DNA, 25 bp, Artificial Sequence
  Description of Artificial Sequence: Synthetic probe
gtgttcctggtcctcgttgcaatcg

SEQ ID NO: 160 - DNA, 25 bp, Artificial Sequence
  Description of Artificial Sequence: Synthetic probe
gcctttgcagtcaaccacttctggt

SEQ ID NO: 161 - DNA, 25 bp, Artificial Sequence
  Description of Artificial Sequence: Synthetic probe
gcagtcaaccacttctggtgccagg

SEQ ID NO: 162 - DNA, 25 bp, Artificial Sequence
  Description of Artificial Sequence: Synthetic probe
aaccacttctggtgccaggaggagc

SEQ ID NO: 163 - DNA, 25 bp, Artificial Sequence
  Description of Artificial Sequence: Synthetic probe
aggaggagccggagcctgcacacat

SEQ ID NO: 164 - DNA, 25 bp, Artificial Sequence
  Description of Artificial Sequence: Synthetic probe
ggaaggtactcttcgatggcggcca

SEQ ID NO: 165 - DNA, 25 bp, Artificial Sequence
  Description of Artificial Sequence: Synthetic probe
aaggtactcttcgatggcggccagt

SEQ ID NO: 166 - DNA, 25 bp, Artificial Sequence
  Description of Artificial Sequence: Synthetic probe
tcgatggcggccagtttcaggtcca

SEQ ID NO: 167 - DNA, 25 bp, Artificial Sequence
  Description of Artificial Sequence: Synthetic probe
gcggccagtttcaggtccagtgagc

SEQ ID NO: 168 - DNA, 25 bp, Artificial Sequence
  Description of Artificial Sequence: Synthetic probe
aggtccagtgagcatgagaatgcct

SEQ ID NO: 169 - DNA, 25 bp, Artificial Sequence
  Description of Artificial Sequence: Synthetic probe
gtccagtgagcatgagaatgcctat

SEQ ID NO: 170 - DNA, 25 bp, Artificial Sequence
  Description of Artificial Sequence: Synthetic probe
agaatgcctatgagaatgtgcccga

SEQ ID NO: 171 - DNA, 383 bp, Homo sapiens
  modified_base (117)..(117): a, c, g, t, unknown or other
  modified_base (234)..(250): a, c, g, t, unknown or other
ccagatgttgcttctctgaggcagcaggttgaggccttacagggacaagtacagcacctccaggctgctttctctcagtataagaaagttgagctcttcccaaatggccaaagtgtnggggagaagattttcaagacagcaggctttgtaaaaccatttacggaggcacagctgctgtgcacacaggctggtggacagttggcctctccacgctctgccgctgagaatgccgcnnnnnnnnnnnnnnnnntagctaagaacgaggctgctttcctgagcatgactgattccaagacagagggcaagttcacctaccccacaggagagtccctggtctattccaactgggccccaggggagcccaacgatgatggcgggtcaga

SEQ ID NO: 172 - DNA, 25 bp, Artificial Sequence
  Description of Artificial Sequence: Synthetic probe
ccagatgttgcttctctgaggcagc

SEQ ID NO: 173 - DNA, 25 bp, Artificial Sequence
  Description of Artificial Sequence: Synthetic probe
tctgaggcagcaggttgaggcctta

SEQ ID NO: 174 - DNA, 25 bp, Artificial Sequence
  Description of Artificial Sequence: Synthetic probe
acaagtacagcacctccaggctgct

SEQ ID NO: 175 - DNA, 25 bp, Artificial Sequence
  Description of Artificial Sequence: Synthetic probe
ggctgctttctctcagtataagaaa

SEQ ID NO: 176 - DNA, 25 bp, Artificial Sequence
  Description of Artificial Sequence: Synthetic probe
agctcttcccaaatggccaaagtgt

SEQ ID NO: 177 - DNA, 25 bp, Artificial Sequence
  Description of Artificial Sequence: Synthetic probe
aagattttcaagacagcaggctttg

SEQ ID NO: 178 - DNA, 25 bp, Artificial Sequence
  Description of Artificial Sequence: Synthetic probe
acggaggcacagctgctgtgcacac

SEQ ID NO: 179 - DNA, 25 bp, Artificial Sequence
  Description of Artificial Sequence: Synthetic probe
aggctggtggacagttggcctctcc

SEQ ID NO: 180 - DNA, 25 bp, Artificial Sequence
  Description of Artificial Sequence: Synthetic probe
ggacagttggcctctccacgctctg

SEQ ID NO: 181 - DNA, 25 bp, Artificial Sequence
  Description of Artificial Sequence: Synthetic probe
tagctaagaacgaggctgctttcct

SEQ ID NO: 182 - DNA, 25 bp, Artificial Sequence
  Description of Artificial Sequence: Synthetic probe
taagaacgaggctgctttcctgagc

SEQ ID NO: 183 - DNA, 25 bp, Artificial Sequence
  Description of Artificial Sequence: Synthetic probe
aggctgctttcctgagcatgactga

SEQ ID NO: 184 - DNA, 25 bp, Artificial Sequence
  Description of Artificial Sequence: Synthetic probe
agcatgactgattccaagacagagg

SEQ ID NO: 185 - DNA, 25 bp, Artificial Sequence
  Description of Artificial Sequence: Synthetic probe
ccccacaggagagtccctggtctat

SEQ ID NO: 186 - DNA, 25 bp, Artificial Sequence
  Description of Artificial Sequence: Synthetic probe
gagagtccctggtctattccaactg

SEQ ID NO: 187 - DNA, 25 bp, Artificial Sequence
  Description of Artificial Sequence: Synthetic probe
agcccaacgatgatggcgggtcaga

SEQ ID NO: 188 - DNA, 451 bp, Homo sapiens
  modified_base (30)..(94): a, c, g, t, unknown or other
  modified_base (96)..(96): a, c, g, t, unknown or other
  modified_base (326)..(327): a, c, g, t, unknown or other
ctactggatcaggacttttgttccaggttnnnnnnnnnnnnnnnnnnnnnnnnnnnnnnnnnnnnnnnnnnnnnnnnnnnnnnnnnnnnnnnnncngagtggtgagcaccaactacaaccagcatgctatggtgttcttcaagaaagtttctcaaaacagggagtacttcaagatcaccctctacgggagaaccaaggagctgacttcggaactaaaggagaacttcatccgcttctccaaatctctgggcctccctgaaaaccacatcgtcttccctgtcccaatcgaccagtgtatcgacggctgagtgcacaggtgccgccanntgccgcaccagcccgaacaccattgagggagctgggagaccctccccacagtgccacccatgcagctgctccccaggccaccccgctgatggagccccaccttgtctgctaaataaacatgtgc

SEQ ID NO: 189 - DNA, 25 bp, Artificial Sequence
  Description of Artificial Sequence: Synthetic probe
ctactggatcaggacttttgttcca

SEQ ID NO: 190 - DNA, 25 bp, Artificial Sequence
  Description of Artificial Sequence: Synthetic probe
tggatcaggacttttgttccaggtt

SEQ ID NO: 191 - DNA, 25 bp, Artificial Sequence
  Description of Artificial Sequence: Synthetic probe
agtggtgagcaccaactacaaccag

SEQ ID NO: 192 - DNA, 25 bp, Artificial Sequence
  Description of Artificial Sequence: Synthetic probe
tgagcaccaactacaaccagcatgc

SEQ ID NO: 193 - DNA, 25 bp, Artificial Sequence
  Description of Artificial Sequence: Synthetic probe
ctacaaccagcatgctatggtgttc

SEQ ID NO: 194 - DNA, 25 bp, Artificial Sequence
  Description of Artificial Sequence: Synthetic probe
cttcaagaaagtttctcaaaacagg

SEQ ID NO: 195 - DNA, 25 bp, Artificial Sequence
  Description of Artificial Sequence: Synthetic probe
aaccaaggagctgacttcggaacta

SEQ ID NO: 196 - DNA, 25 bp, Artificial Sequence
  Description of Artificial Sequence: Synthetic probe
tccctgtcccaatcgaccagtgtat

SEQ ID NO: 197 - DNA, 25 bp, Artificial Sequence
  Description of Artificial Sequence: Synthetic probe
caatcgaccagtgtatcgacggctg

SEQ ID NO: 198 - DNA, 25 bp, Artificial Sequence
  Description of Artificial Sequence: Synthetic probe
tcgaccagtgtatcgacggctgagt

SEQ ID NO: 199 - DNA, 25 bp, Artificial Sequence
  Description of Artificial Sequence: Synthetic probe
cagcccgaacaccattgagggagct

SEQ ID NO: 200 - DNA, 25 bp, Artificial Sequence
  Description of Artificial Sequence: Synthetic probe
cccgaacaccattgagggagctggg

SEQ ID NO: 201 - DNA, 25 bp, Artificial Sequence
  Description of Artificial Sequence: Synthetic probe
ccattgagggagctgggagaccctc

SEQ ID NO: 202 - DNA, 25 bp, Artificial Sequence
  Description of Artificial Sequence: Synthetic probe
cattgagggagctgggagaccctcc

SEQ ID NO: 203 - DNA, 25 bp, Artificial Sequence
  Description of Artificial Sequence: Synthetic probe
accttgtctgctaaataaacatgtg

SEQ ID NO: 204 - DNA, 25 bp, Artificial Sequence
  Description of Artificial Sequence: Synthetic probe
ccttgtctgctaaataaacatgtgc

SEQ ID NO: 205 - DNA, 498 bp, Homo sapiens
  modified_base (41)..(41): a, c, g, t, unknown or other
  modified_base (85)..(85): a, c, g, t, unknown or other
  modified_base (89)..(89): a, c, g, t, unknown or other
  modified_base (96)..(96): a, c, g, t, unknown or other
  modified_base (164)..(180): a, c, g, t, unknown or other
  modified_base (216)..(231): a, c, g, t, unknown or other
  modified_base (330)..(361): a, c, g, t, unknown or other
gttcatccggcctgagggagagatcaccgattacagaaccngggtcagcggggtcacccctcagcacatggtgggggccacaccntttngccgtgnccaggctagagatcctgcagctcctgaaaggcaagctggtggtgggtcatgacctgaagcacgacttnnnnnnnnnnnnnnnnnacatgagcggctacacaatctacgacacgtccactnnnnnnnnnnnnnnnngtgaggccaagctggaccactgcaggcgtgtctccctgcgggtgctgagtgagcgcctcctgcacaagagcatccagaacagcctgcttggacacagcnnnnnnnnnnnnnnnnnnnnnnnnnnnnnnnnctatcaaatctcccagagaatccgagcccgccgagggctgccccgcctggctgtgtcagactgaagccccatccagcccgttccgcagggactagaggctttcggctttttgggacagcaactaccttgcttttgga

SEQ ID NO: 206 - DNA, 25 bp, Artificial Sequence
  Description of Artificial Sequence: Synthetic probe
gttcatccggcctgagggagagatc

SEQ ID NO: 207 - DNA, 25 bp, Artificial Sequence
  Description of Artificial Sequence: Synthetic probe
tcatccggcctgagggagagatcac

SEQ ID NO: 208 - DNA, 25 bp, Artificial Sequence
  Description of Artificial Sequence: Synthetic probe
ccggcctgagggagagatcaccgat

SEQ ID NO: 209 - DNA, 25 bp, Artificial Sequence
  Description of Artificial Sequence: Synthetic probe
ccaggctagagatcctgcagctcct

SEQ ID NO: 210 - DNA, 25 bp, Artificial Sequence
  Description of Artificial Sequence: Synthetic probe
tagagatcctgcagctcctgaaagg

SEQ ID NO: 211 - DNA, 25 bp, Artificial Sequence
  Description of Artificial Sequence: Synthetic probe
tggtgggtcatgacctgaagcacga

SEQ ID NO: 212 - DNA, 25 bp, Artificial Sequence
  Description of Artificial Sequence: Synthetic probe
acatgagcggctacacaatctacga

SEQ ID NO: 213 - DNA, 25 bp, Artificial Sequence
  Description of Artificial Sequence: Synthetic probe
catgagcggctacacaatctacgac

SEQ ID NO: 214 - DNA, 25 bp, Artificial Sequence
  Description of Artificial Sequence: Synthetic probe
aagctggaccactgcaggcgtgtct

SEQ ID NO: 215 - DNA, 25 bp, Artificial Sequence
  Description of Artificial Sequence: Synthetic probe
agagcatccagaacagcctgcttgg

SEQ ID NO: 216 - DNA, 25 bp, Artificial Sequence
  Description of Artificial Sequence: Synthetic probe
cccgcctggctgtgtcagactgaag

SEQ ID NO: 217 - DNA, 25 bp, Artificial Sequence
  Description of Artificial Sequence: Synthetic probe
ccgcctggctgtgtcagactgaagc

SEQ ID NO: 218 - DNA, 25 bp, Artificial Sequence
  Description of Artificial Sequence: Synthetic probe
ggctgtgtcagactgaagccccatc

SEQ ID NO: 219 - DNA, 25 bp, Artificial Sequence
  Description of Artificial Sequence: Synthetic probe
gaggctttcggctttttgggacagc

SEQ ID NO: 220 - DNA, 25 bp, Artificial Sequence
  Description of Artificial Sequence: Synthetic probe
ggctttttgggacagcaactacctt

SEQ ID NO: 221 - DNA, 25 bp, Artificial Sequence
  Description of Artificial Sequence: Synthetic probe
ggacagcaactaccttgcttttgga

SEQ ID NO: 222 - DNA, 168 bp, Homo sapiens
  modified_base (117)..(118): a, c, g, t, unknown or other
ctgtgtctgaagtgtaagtgaacacagaagagtgacatgtttacaaacctcaagccagccttgctcctggctggggcctgttgaagatgcttgtattttacttttccattgtaattnntatcgccatcacagctgaacttgttgagatccccgtgttactgcctatca

SEQ ID NO: 223 - DNA, 25 bp, Artificial Sequence
  Description of Artificial Sequence: Synthetic probe
ctgtgtctgaagtgtaagtgaacac

SEQ ID NO: 224 - DNA, 25 bp, Artificial Sequence
  Description of Artificial Sequence: Synthetic probe
gtgacatgtttacaaacctcaagcc

SEQ ID NO: 225 - DNA, 25 bp, Artificial Sequence
  Description of Artificial Sequence: Synthetic probe
gacatgtttacaaacctcaagccag

SEQ ID NO: 226 - DNA, 25 bp, Artificial Sequence
  Description of Artificial Sequence: Synthetic probe
gtttacaaacctcaagccagccttg

SEQ ID NO: 227 - DNA, 25 bp, Artificial Sequence
  Description of Artificial Sequence: Synthetic probe
tcaagccagccttgctcctggctgg

SEQ ID NO: 228 - DNA, 25 bp, Artificial Sequence
  Description of Artificial Sequence: Synthetic probe
caagccagccttgctcctggctggg

SEQ ID NO: 229 - DNA, 25 bp, Artificial Sequence
  Description of Artificial Sequence: Synthetic probe
ctggggcctgttgaagatgcttgta

SEQ ID NO: 230 - DNA, 25 bp, Artificial Sequence
  Description of Artificial Sequence: Synthetic probe
tatcgccatcacagctgaacttgtt

SEQ ID NO: 231 - DNA, 25 bp, Artificial Sequence
  Description of Artificial Sequence: Synthetic probe
atcgccatcacagctgaacttgttg

SEQ ID NO: 232 - DNA, 25 bp, Artificial Sequence
  Description of Artificial Sequence: Synthetic probe
gccatcacagctgaacttgttgaga

SEQ ID NO: 233 - DNA, 25 bp, Artificial Sequence
  Description of Artificial Sequence: Synthetic probe
atcacagctgaacttgttgagatcc

SEQ ID NO: 234 - DNA, 25 bp, Artificial Sequence
  Description of Artificial Sequence: Synthetic probe
acagctgaacttgttgagatccccg

SEQ ID NO: 235 - DNA, 25 bp, Artificial Sequence
  Description of Artificial Sequence: Synthetic probe
gaacttgttgagatccccgtgttac

SEQ ID NO: 236 - DNA, 25 bp, Artificial Sequence
  Description of Artificial Sequence: Synthetic probe
aacttgttgagatccccgtgttact

SEQ ID NO: 237 - DNA, 25 bp, Artificial Sequence
  Description of Artificial Sequence: Synthetic probe
ttgagatccccgtgttactgcctat

SEQ ID NO: 238 - DNA, 25 bp, Artificial Sequence
  Description of Artificial Sequence: Synthetic probe
gagatccccgtgttactgcctatca

SEQ ID NO: 239 - DNA, 569 bp, Homo sapiens
  modified_base (33)..(33): a, c, g, t, unknown or other
  modified_base (39)..(39): a, c, g, t, unknown or other
  modified_base (42)..(42): a, c, g, t, unknown or other
  modified_base (46)..(46): a, c, g, t, unknown or other
  modified_base (53)..(53): a, c, g, t, unknown or other
  modified_base (60)..(60): a, c, g, t, unknown or other
  modified_base (65)..(65): a, c, g, t, unknown or other
  modified_base (93)..(93): a, c, g, t, unknown or other
gtatcattgacacttcctgcagggtggtccctngccctnacnaganctgaaantgaaaangagancagcagctttctagggacagctggaaanggacttaatgtgtttgactatttcttacgagggttctacttatttatgtatttatttttgaaagcttgtattttaatattttacatgctgttatttaaagatgtgagtgtgtttcatcaaacatagctcagtcctgattatttaattggaatatgatgggttttaaatgtgtcattaaactaatatttagtgggagaccataatgtgtcagccaccttgataaatgacagggtggggaactggagggtggggggattgaaatgcaagcaattagtggatcactgttagggtaagggaatgtatgtacacatctattttttatactttttttttaaaaaaagaatgtcagttgttatttattcaaattatctcacattatgtgttcaacatttttatgctgaagtttcccttagacattttatgtcttgcttgtagggcataatgccttgtttaatgtccattctgcagcgtttctc

SEQ ID NO: 240 - DNA, 25 bp, Artificial Sequence
  Description of Artificial Sequence: Synthetic probe
gtatcattgacacttcctgcagggt

SEQ ID NO: 241 - DNA, 25 bp, Artificial Sequence
  Description of Artificial Sequence: Synthetic probe
tgacacttcctgcagggtggtccct

SEQ ID NO: 242 - DNA, 25 bp, Artificial Sequence
  Description of Artificial Sequence: Synthetic probe
cagcagctttctagggacagctgga

SEQ ID NO: 243 - DNA, 25 bp, Artificial Sequence
  Description of Artificial Sequence: Synthetic probe
tgactatttcttacgagggttctac

SEQ ID NO: 244 - DNA, 25 bp, Artificial Sequence
  Description of Artificial Sequence: Synthetic probe
tcttacgagggttctacttatttat

SEQ ID NO: 245 - DNA, 25 bp, Artificial Sequence
  Description of Artificial Sequence: Synthetic probe
cttacgagggttctacttatttatg

SEQ ID NO: 246 - DNA, 25 bp, Artificial Sequence
  Description of Artificial Sequence: Synthetic probe
tgtgtttcatcaaacatagctcagt

SEQ ID NO: 247 - DNA, 25 bp, Artificial Sequence
  Description of Artificial Sequence: Synthetic probe
gtgtttcatcaaacatagctcagtc

SEQ ID NO: 248 - DNA, 25 bp, Artificial Sequence
  Description of Artificial Sequence: Synthetic probe
gtcagccaccttgataaatgacagg

SEQ ID NO: 249 - DNA, 25 bp, Artificial Sequence
  Description of Artificial Sequence: Synthetic probe
tcagccaccttgataaatgacaggg

SEQ ID NO: 250 - DNA, 25 bp, Artificial Sequence
  Description of Artificial Sequence: Synthetic probe
agccaccttgataaatgacagggtg

SEQ ID NO: 251 - DNA, 25 bp, Artificial Sequence
  Description of Artificial Sequence: Synthetic probe
atttttatgctgaagtttcccttag

SEQ ID NO: 252 - DNA, 25 bp, Artificial Sequence
  Description of Artificial Sequence: Synthetic probe
ttatgctgaagtttcccttagacat

SEQ ID NO: 253 - DNA, 25 bp, Artificial Sequence
  Description of Artificial Sequence: Synthetic probe
tatgctgaagtttcccttagacatt

SEQ ID NO: 254 - DNA, 25 bp, Artificial Sequence
  Description of Artificial Sequence: Synthetic probe
ttaatgtccattctgcagcgtttct

SEQ ID NO: 255 - DNA, 25 bp, Artificial Sequence
  Description of Artificial Sequence: Synthetic probe
taatgtccattctgcagcgtttctc

SEQ ID NO: 256 - DNA, 302 bp, Homo sapiens
  modified_base (117)..(140): a, c, g, t, unknown or other
cactccaagctgaggatgatccactgcaggcaaaagcttatgaggctgatgcccaggagcagcgtggggcaaatgaccaggactttgccgtctcctttgcagaggatgcaagctcannnnnnnnnnnnnnnnnnnnnnnnacaagggctttcacttgccattgcagaaggtcctgttattcaacagaatattcctatgggacctgcactgtcatgggtattaaccacagattctgctgcctctgagggatgagaacagagagaaatatattcataatttactttatgacctagaaggaaact

SEQ ID NO: 257 - DNA, 25 bp, Artificial Sequence
  Description of Artificial Sequence: Synthetic probe
cactccaagctgaggatgatccact

SEQ ID NO: 258 - DNA, 25 bp, Artificial Sequence
  Description of Artificial Sequence: Synthetic probe
tccaagctgaggatgatccactgca

SEQ ID NO: 259 - DNA, 25 bp, Artificial Sequence
  Description of Artificial Sequence: Synthetic probe
aagctgaggatgatccactgcaggc

SEQ ID NO: 260 - DNA, 25 bp, Artificial Sequence
  Description of Artificial Sequence: Synthetic probe
tccactgcaggcaaaagcttatgag

SEQ ID NO: 261 - DNA, 25 bp, Artificial Sequence
  Description of Artificial Sequence: Synthetic probe
agcttatgaggctgatgcccaggag

SEQ ID NO: 262 - DNA, 25 bp, Artificial Sequence
  Description of Artificial Sequence: Synthetic probe
ggcaaatgaccaggactttgccgtc

SEQ ID NO: 263 - DNA, 25 bp, Artificial Sequence
  Description of Artificial Sequence: Synthetic probe
atgaccaggactttgccgtctcctt

SEQ ID NO: 264 - DNA, 25 bp, Artificial Sequence
  Description of Artificial Sequence: Synthetic probe
ctcctttgcagaggatgcaagctca

SEQ ID NO: 265 - DNA, 25 bp, Artificial Sequence
  Description of Artificial Sequence: Synthetic probe
acaagggctttcacttgccattgca

SEQ ID NO: 266 - DNA, 25 bp, Artificial Sequence
  Description of Artificial Sequence: Synthetic probe
gccattgcagaaggtcctgttattc

SEQ ID NO: 267 - DNA, 25 bp, Artificial Sequence
  Description of Artificial Sequence: Synthetic probe
gcagaaggtcctgttattcaacaga

SEQ ID NO: 268 - DNA, 25 bp, Artificial Sequence
  Description of Artificial Sequence: Synthetic probe
agaatattcctatgggacctgcact

SEQ ID NO: 269 - DNA, 25 bp, Artificial Sequence
  Description of Artificial Sequence: Synthetic probe
ggacctgcactgtcatgggtattaa

SEQ ID NO: 270 - DNA, 25 bp, Artificial Sequence
  Description of Artificial Sequence: Synthetic probe
accacagattctgctgcctctgagg

SEQ ID NO: 271 - DNA, 25 bp, Artificial Sequence
  Description of Artificial Sequence: Synthetic probe
tgcctctgagggatgagaacagaga

SEQ ID NO: 272 - DNA, 25 bp, Artificial Sequence
  Description of Artificial Sequence: Synthetic probe
ttactttatgacctagaaggaaact

SEQ ID NO: 273 - DNA, 313 bp, Homo sapiens
  modified_base (26)..(26): a, c, g, t, unknown or other
  modified_base (50)..(51): a, c, g, t, unknown or other
  modified_base (66)..(66): a, c, g, t, unknown or other
  modified_base (144)..(161): a, c, g, t, unknown or other
tgagtcactccaggaaagagctgatnaggctacaacccagaagcagtctnnggaagacaaccaggnccttgctatctcctttgcaggaaatggactctctgctcttagaacctcaggttctcaggcaagagccacctgctattnnnnnnnnnnnnnnnnnnctacccgtgagtccctctccggggtgtgtgaaatcagtggccgcctctacagactctgctgtcgctgagcttcctagatagaaaccaaagcagtgcaagattcagttcaaggtcctgaaaaaagaaaaacattttactctgtgtaccttgtg

SEQ ID NO: 274 - DNA, 25 bp, Artificial Sequence
  Description of Artificial Sequence: Synthetic probe
tgagtcactccaggaaagagctgat

SEQ ID NO: 275 - DNA, 25 bp, Artificial Sequence
  Description of Artificial Sequence: Synthetic probe
ccttgctatctcctttgcaggaaat

SEQ ID NO: 276 - DNA, 25 bp, Artificial Sequence
  Description of Artificial Sequence: Synthetic probe
cttgctatctcctttgcaggaaatg

SEQ ID NO: 277 - DNA, 25 bp, Artificial Sequence
  Description of Artificial Sequence: Synthetic probe
tatctcctttgcaggaaatggactc

SEQ ID NO: 278 - DNA, 25 bp, Artificial Sequence
  Description of Artificial Sequence: Synthetic probe
aggaaatggactctctgctcttaga

SEQ ID NO: 279 - DNA, 25 bp, Artificial Sequence
  Description of Artificial Sequence: Synthetic probe
ctctgctcttagaacctcaggttct

SEQ ID NO: 280 - DNA, 25 bp, Artificial Sequence
  Description of Artificial Sequence: Synthetic probe
aacctcaggttctcaggcaagagcc

SEQ ID NO: 281 - DNA, 25 bp, Artificial Sequence
  Description of Artificial Sequence: Synthetic probe
ttctcaggcaagagccacctgctat

SEQ ID NO: 282 - DNA, 25 bp, Artificial Sequence
  Description of Artificial Sequence: Synthetic probe
tgtgtgaaatcagtggccgcctcta

SEQ ID NO: 283 - DNA, 25 bp, Artificial Sequence
  Description of Artificial Sequence: Synthetic probe
tggccgcctctacagactctgctgt

SEQ ID NO: 284 - DNA, 25 bp, Artificial Sequence
  Description of Artificial Sequence: Synthetic probe
ctgctgtcgctgagcttcctagata

SEQ ID NO: 285 - DNA, 25 bp, Artificial Sequence
  Description of Artificial Sequence: Synthetic probe
tcgctgagcttcctagatagaaacc

SEQ ID NO: 286 - DNA, 25 bp, Artificial Sequence
  Description of Artificial Sequence: Synthetic probe
agcttcctagatagaaaccaaagca

SEQ ID NO: 287 - DNA, 25 bp, Artificial Sequence
  Description of Artificial Sequence: Synthetic probe
agtgcaagattcagttcaaggtcct

SEQ ID NO: 288 - DNA, 25 bp, Artificial Sequence
  Description of Artificial Sequence: Synthetic probe
agattcagttcaaggtcctgaaaaa

SEQ ID NO: 289 - DNA, 25 bp, Artificial Sequence
  Description of Artificial Sequence: Synthetic probe
aacattttactctgtgtaccttgtg

SEQ ID NO: 290 - DNA, 561 bp, Homo sapiens
  modified_base (27)..(27): a, c, g, t, unknown or other
  modified_base (61)..(61): a, c, g, t, unknown or other
  modified_base (376)..(376): a, c, g, t, unknown or other
tccttagccttgctcaggtgcaagtgnccccagggggcggggtgcagaagaatccgagtgntttgccaggcttaaggagaggagaaactgagaaatgaatgctgagacccccggagcaggggtctgagccacagccgtgctcgcccacaaactgatttctcacggcgtgtcaccccaccagggcgcaagcctcactattacttgaactttccaaaacctaaagaggaaaagtgcaatgcgtgttgtacatacagaggtaactatcaatatttaagtttgttgctgtcaagattttttttgtaacttcaaatatagagatatttttgtacgttatatattgtattaagggcattttaaaagcaattatattgtcctncccctattttaagacgtgaatgtctcagcgaggtgtaaagttgttcgccgcgtggaatgtgagtgtgtttgtgtgcatgaaagagaaagactgattacctcctgtgtggaagaaggaaacaccgagtctctgtataatctatttacataaaatgggtgatatgcgaacagcaaaccaataaactg

SEQ ID NO: 291 - DNA, 25 bp, Artificial Sequence
  Description of Artificial Sequence: Synthetic probe
tccttagccttgctcaggtgcaagt

SEQ ID NO: 292 - DNA, 25 bp, Artificial Sequence
  Description of Artificial Sequence: Synthetic probe
tgccaggcttaaggagaggagaaac

SEQ ID NO: 293 - DNA, 25 bp, Artificial Sequence
  Description of Artificial Sequence: Synthetic probe
cgtgctcgcccacaaactgatttct

SEQ ID NO: 294 - DNA, 25 bp, Artificial Sequence
  Description of Artificial Sequence: Synthetic probe
caaactgatttctcacggcgtgtca

SEQ ID NO: 295 - DNA, 25 bp, Artificial Sequence
  Description of Artificial Sequence: Synthetic probe
gcgcaagcctcactattacttgaac

SEQ ID NO: 296 - DNA, 25 bp, Artificial Sequence
  Description of Artificial Sequence: Synthetic probe
aagtgcaatgcgtgttgtacataca

SEQ ID NO: 297 - DNA, 25 bp, Artificial Sequence
  Description of Artificial Sequence: Synthetic probe
tgcaatgcgtgttgtacatacagag

SEQ ID NO: 298 - DNA, 25 bp, Artificial Sequence
  Description of Artificial Sequence: Synthetic probe
tgtacatacagaggtaactatcaat

SEQ ID NO: 299 - DNA, 25 bp, Artificial Sequence
  Description of Artificial Sequence: Synthetic probe
cccctattttaagacgtgaatgtct

SEQ ID NO: 300 - DNA, 25 bp, Artificial Sequence
  Description of Artificial Sequence: Synthetic probe
gacgtgaatgtctcagcgaggtgta

SEQ ID NO: 301 - DNA, 25 bp, Artificial Sequence
  Description of Artificial Sequence: Synthetic probe
gtgtaaagttgttcgccgcgtggaa

SEQ ID NO: 302 - DNA, 25 bp, Artificial Sequence
  Description of Artificial Sequence: Synthetic probe
gaaagactgattacctcctgtgtgg

SEQ ID NO: 303 - DNA, 25 bp, Artificial Sequence
  Description of Artificial Sequence: Synthetic probe
ctgattacctcctgtgtggaagaag

SEQ ID NO: 304 - DNA, 25 bp, Artificial Sequence
  Description of Artificial Sequence: Synthetic probe
acctcctgtgtggaagaaggaaaca

SEQ ID NO: 305 - DNA, 25 bp, Artificial Sequence
  Description of Artificial Sequence: Synthetic probe
gaaacaccgagtctctgtataatct

SEQ ID NO: 306 - DNA, 25 bp, Artificial Sequence
  Description of Artificial Sequence: Synthetic probe
atgcgaacagcaaaccaataaactg

SEQ ID NO: 307 - DNA, 470 bp, Homo sapiens
  modified_base (123)..(123): a, c, g, t, unknown or other
  modified_base (125)..(128): a, c, g, t, unknown or other
  modified_base (132)..(132): a, c, g, t, unknown or other
  modified_base (171)..(171): a, c, g, t, unknown or other
  modified_base (297)..(315): a, c, g, t, unknown or other
  modified_base (378)..(392): a, c, g, t, unknown or other
tcctggcactggttttgatacttggaattttgaggttcagggaattcagagaatttggtagcacagtgtattgggagaaagggaaatttcgggtgacagattgatcaccctggctgacatgtntnnnngaantgggtgggtgggtttgattgagaaacactttgggctccngcagtgatggtgggaaagaaaaattctttccaaagctgcacttctcttaataattctctcccctcaaaagaaagattatgataaagaataatttggagtaataagtaacaagatagaattagaaannnnnnnnnnnnnnnnnnngaccattcagaggtgtggctttttccacgtctttttctcctgcaatgaactgctcccacgtcnnnnnnnnnnnnnnnagtctaatgaacactttgtgaaacaaatcgtaagtatgtacgcacgcatatcaaactatgctctgaggataaagcaag

SEQ ID NO: 308 - DNA, 25 bp, Artificial Sequence
  Description of Artificial Sequence: Synthetic probe
tcctggcactggttttgatacttgg

SEQ ID NO: 309 - DNA, 25 bp, Artificial Sequence
  Description of Artificial Sequence: Synthetic probe
aaatttcgggtgacagattgatcac

SEQ ID NO: 310 - DNA, 25 bp, Artificial Sequence
  Description of Artificial Sequence: Synthetic probe
tttcgggtgacagattgatcaccct

SEQ ID NO: 311 - DNA, 25 bp, Artificial Sequence
  Description of Artificial Sequence: Synthetic probe
gtgacagattgatcaccctggctga

SEQ ID NO: 312 - DNA, 25 bp, Artificial Sequence
  Description of Artificial Sequence: Synthetic probe
gacagattgatcaccctggctgaca

SEQ ID NO: 313 - DNA, 25 bp, Artificial Sequence
  Description of Artificial Sequence: Synthetic probe
gaccattcagaggtgtggctttttc

SEQ ID NO: 314 - DNA, 25 bp, Artificial Sequence
  Description of Artificial Sequence: Synthetic probe
gaggtgtggctttttccacgtcttt

SEQ ID NO: 315 - DNA, 25 bp, Artificial Sequence
  Description of Artificial Sequence: Synthetic probe
cgtctttttctcctgcaatgaactg

SEQ ID NO: 316 - DNA, 25 bp, Artificial Sequence
  Description of Artificial Sequence: Synthetic probe
gtctttttctcctgcaatgaactgc

SEQ ID NO: 317 - DNA, 25 bp, Artificial Sequence
  Description of Artificial Sequence: Synthetic probe
agtctaatgaacactttgtgaaaca

SEQ ID NO: 318 - DNA, 25 bp, Artificial Sequence
  Description of Artificial Sequence: Synthetic probe
tgaacactttgtgaaacaaatcgta

SEQ ID NO: 319 - DNA, 25 bp, Artificial Sequence
  Description of Artificial Sequence: Synthetic probe
atcgtaagtatgtacgcacgcatat

SEQ ID NO: 320 - DNA, 25 bp, Artificial Sequence
  Description of Artificial Sequence: Synthetic probe
aagtatgtacgcacgcatatcaaac

SEQ ID NO: 321 - DNA, 25 bp, Artificial Sequence
  Description of Artificial Sequence: Synthetic probe
gcacgcatatcaaactatgctctga

SEQ ID NO: 322 - DNA, 25 bp, Artificial Sequence
  Description of Artificial Sequence: Synthetic probe
atatcaaactatgctctgaggataa

SEQ ID NO: 323 - DNA, 25 bp, Artificial Sequence
  Description of Artificial Sequence: Synthetic probe
aactatgctctgaggataaagcaag

SEQ ID NO: 324 - DNA, 572 bp, Homo sapiens
  modified_base (44)..(44): a, c, g, t, unknown or other
  modified_base (46)..(46): a, c, g, t, unknown or other
  modified_base (52)..(52): a, c, g, t, unknown or other
  modified_base (66)..(66): a, c, g, t, unknown or other
  modified_base (79)..(79): a, c, g, t, unknown or other
  modified_base (81)..(81): a, c, g, t, unknown or other
  modified_base (86)..(86): a, c, g, t, unknown or other
  modified_base (121)..(191): a, c, g, t, unknown or other
tactgaagtgtgctcccgtgagatgctgaatctcctttgcagcnangccttntttataatttgtgnatttgacagtaananctttnaacacgagtcgcttggatgtgtatctatcacatannnnnnnnnnnnnnnnnnnnnnnnnnnnnnnnnnnnnnnnnnnnnnnnnnnnnnnnnnnnnnnnnnnnnnntatgactggggaagcccagttcagaataggatgcactatgatcagtcccaacctccctactacaatgtgacagccatgaatgtaccaattgcagtgtggaacggtggcaaggacctgttggctgacccccaagatgttggccttttgcttccaaaactccccaatcttatttaccacaaggagattcctttttacaatcacttggactttatctgggcaatggatgcccctcaagaagtttacaatgacattgtttctatgatatcagaagataaaaagtagttctggatttaaagaattatccgtttgtttttccaaaatactttattctctcatacatagtattttcataatgtttgacatgcagtgcttctttctgta

SEQ ID NO: 325 - DNA, 25 bp, Artificial Sequence
  Description of Artificial Sequence: Synthetic probe
tactgaagtgtgctcccgtgagatg

SEQ ID NO: 326 - DNA, 25 bp, Artificial Sequence
  Description of Artificial Sequence: Synthetic probe
agtgtgctcccgtgagatgctgaat

SEQ ID NO: 327 - DNA, 25 bp, Artificial Sequence
  Description of Artificial Sequence: Synthetic probe
ctcccgtgagatgctgaatctcctt

SEQ ID NO: 328 - DNA, 25 bp, Artificial Sequence
  Description of Artificial Sequence: Synthetic probe
gagtcgcttggatgtgtatctatca

SEQ ID NO: 329 - DNA, 25 bp, Artificial Sequence
  Description of Artificial Sequence: Synthetic probe
tcgcttggatgtgtatctatcacat

SEQ ID NO: 330 - DNA, 25 bp, Artificial Sequence
  Description of Artificial Sequence: Synthetic probe
tatgactggggaagcccagttcaga

SEQ ID NO: 331 - DNA, 25 bp, Artificial Sequence
  Description of Artificial Sequence: Synthetic probe
taggatgcactatgatcagtcccaa

SEQ ID NO: 332 - DNA, 25 bp, Artificial Sequence
  Description of Artificial Sequence: Synthetic probe
ctactacaatgtgacagccatgaat

SEQ ID NO: 333 - DNA, 25 bp, Artificial Sequence
  Description of Artificial Sequence: Synthetic probe
catgaatgtaccaattgcagtgtgg

SEQ ID NO: 334 - DNA, 25 bp, Artificial Sequence
  Description of Artificial Sequence: Synthetic probe
caatcacttggactttatctgggca

SEQ ID NO: 335 - DNA, 25 bp, Artificial Sequence
  Description of Artificial Sequence: Synthetic probe
cttggactttatctgggcaatggat

SEQ ID NO: 336 - DNA, 25 bp, Artificial Sequence
  Description of Artificial Sequence: Synthetic probe
ctgggcaatggatgcccctcaagaa

SEQ ID NO: 337 - DNA, 25 bp, Artificial Sequence
  Description of Artificial Sequence: Synthetic probe
gcccctcaagaagtttacaatgaca

SEQ ID NO: 338 - DNA, 25 bp, Artificial Sequence
  Description of Artificial Sequence: Synthetic probe
tttcataatgtttgacatgcagtgc

SEQ ID NO: 339 - DNA, 25 bp, Artificial Sequence
  Description of Artificial Sequence: Synthetic probe
taatgtttgacatgcagtgcttctt

SEQ ID NO: 340 - DNA, 25 bp, Artificial Sequence
  Description of Artificial Sequence: Synthetic probe
ttgacatgcagtgcttctttctgta

SEQ ID NO: 341 - DNA, 461 bp, Homo sapiens
  modified_base (36)..(73): a, c, g, t, unknown or other
  modified_base (83)..(84): a, c, g, t, unknown or other
  modified_base (86)..(87): a, c, g, t, unknown or other
  modified_base (91)..(93): a, c, g, t, unknown or other
  modified_base (99)..(100): a, c, g, t, unknown or other
  modified_base (102)..(104): a, c, g, t, unknown or other
  modified_base (106)..(109): a, c, g, t, unknown or other
  modified_base (111)..(138): a, c, g, t, unknown or other
  modified_base (204)..(205): a, c, g, t, unknown or other
  modified_base (269)..(269): a, c, g, t, unknown or other
  modified_base (339)..(339): a, c, g, t, unknown or other
  modified_base (341)..(345): a, c, g, t, unknown or other
  modified_base (349)..(350): a, c, g, t, unknown or other
  modified_base (376)..(390): a, c, g, t, unknown or other
gctccggtatcctctcactgtcaaactcgtgccgannnnnnnnnnnnnnnnnnnnnnnnnnnnnnnnnnnnnngatcccatcnncnncccnnnggcctnnannnannnngnnnnnnnnnnnnnnnnnnnnnnnnnnnnctggcctgagttgctgaggtgctcgccaagatcgcagccaaacaccctctgtcgcaggattccccnntgccgcagccgctgccgagaagggcgggagcgcatgaaggtgcggagcaggccggccagcttcncacgaggccgtggcacagctgaggtcagagacgagataccctggggagccgggatgccacatggggggcnannnnnatcnnccttcaggcccggacctggccgctcnnnnnnnnnnnnnnnacactcactggggaagaacccgacctggaagcctcgcttgccccgccaccagctccgatcctctgtgggtg

SEQ ID NO: 342 - DNA, 25 bp, Artificial Sequence
  Description of Artificial Sequence: Synthetic probe
gctccggtatcctctcactgtcaaa

SEQ ID NO: 343 - DNA, 25 bp, Artificial Sequence
  Description of Artificial Sequence: Synthetic probe
cggtatcctctcactgtcaaactcg

SEQ ID NO: 344 - DNA, 25 bp, Artificial Sequence
  Description of Artificial Sequence: Synthetic probe
gtatcctctcactgtcaaactcgtg

SEQ ID NO: 345 - DNA, 25 bp, Artificial Sequence
  Description of Artificial Sequence: Synthetic probe
gcctgagttgctgaggtgctcgcca

SEQ ID NO: 346 - DNA, 25 bp, Artificial Sequence
  Description of Artificial Sequence: Synthetic probe
ttgctgaggtgctcgccaagatcgc

SEQ ID NO: 347 - DNA, 25 bp, Artificial Sequence
  Description of Artificial Sequence: Synthetic probe
tgctcgccaagatcgcagccaaaca

SEQ ID NO: 348 - DNA, 25 bp, Artificial Sequence
  Description of Artificial Sequence: Synthetic probe
aagatcgcagccaaacaccctctgt

SEQ ID NO: 349 - DNA, 25 bp, Artificial Sequence
  Description of Artificial Sequence: Synthetic probe
ccgtggcacagctgaggtcagagac

SEQ ID NO: 350 - DNA, 25 bp, Artificial Sequence
  Description of Artificial Sequence: Synthetic probe
gcacagctgaggtcagagacgagat

SEQ ID NO: 351 - DNA, 25 bp, Artificial Sequence
  Description of Artificial Sequence: Synthetic probe
agctgaggtcagagacgagataccc

SEQ ID NO: 352 - DNA, 25 bp, Artificial Sequence
  Description of Artificial Sequence: Synthetic probe
tcagagacgagataccctggggagc

SEQ ID NO: 353 - DNA, 25 bp, Artificial Sequence
  Description of Artificial Sequence: Synthetic probe
cagagacgagataccctggggagcc

SEQ ID NO: 354 - DNA, 25 bp, Artificial Sequence
  Description of Artificial Sequence: Synthetic probe
ggaagaacccgacctggaagcctcg

SEQ ID NO: 355 - DNA, 25 bp, Artificial Sequence
  Description of Artificial Sequence: Synthetic probe
agaacccgacctggaagcctcgctt

SEQ ID NO: 356 - DNA, 25 bp, Artificial Sequence
  Description of Artificial Sequence: Synthetic probe
gaacccgacctggaagcctcgcttg

SEQ ID NO: 357 - DNA, 25 bp, Artificial Sequence
  Description of Artificial Sequence: Synthetic probe
caccagctccgatcctctgtgggtg

SEQ ID NO: 358 - DNA, 574 bp, Homo sapiens
  modified_base (28)..(49): a, c, g, t, unknown or other
  modified_base (134)..(134): a, c, g, t, unknown or other
  modified_base (141)..(207): a, c, g, t, unknown or other
  modified_base (505)..(528): a, c, g, t, unknown or other
cgtcaacgggagaagcgtgctgaccgcnnnnnnnnnnnnnnnnnnnnnncttatgtgtgaccttggtggtggggctggagctctggctaaggaatgcatgtctctgtaccctggatgtaagatcaccgtttttnacatccnnnnnnnnnnnnnnnnnnnnnnnnnnnnnnnnnnnnnnnnnnnnnnnnnnnnnnnnnnnnnnnnnnnaggggatttcttcaaagaccctcttccggaagctgatctgtacatcctggccagggtcctccatgactgggcagacggaaagtgctcacacctgctggagaggatctaccacacttgcaagccaggtggtggcattctggtaattgaaagcctcctggatgaagacaggcgaggtcctctgctcacgcagctctactctctgaacatgcttgtgcagacggaagggcaggagaggacccccacccactaccacatgctcctctcttctgctggcttcagagacttccagtttaagaannnnnnnnnnnnnnnnnnnnnnnntttagccaggaaataactgtttcttgtgacctggaactaacgtcaa

SEQ ID NO: 359 - DNA, 25 bp, Artificial Sequence
  Description of Artificial Sequence: Synthetic probe
cgtcaacgggagaagcgtgctgacc

SEQ ID NO: 360 - DNA, 25 bp, Artificial Sequence
  Description of Artificial Sequence: Synthetic probe
ctctgtaccctggatgtaagatcac

SEQ ID NO: 361 - DNA, 25 bp, Artificial Sequence
  Description of Artificial Sequence: Synthetic probe
tctgtaccctggatgtaagatcacc

SEQ ID NO: 362 - DNA, 25 bp, Artificial Sequence
  Description of Artificial Sequence: Synthetic probe
gtaccctggatgtaagatcaccgtt

SEQ ID NO: 363 - DNA, 25 bp, Artificial Sequence
  Description of Artificial Sequence: Synthetic probe
ggatttcttcaaagaccctcttccg

SEQ ID NO: 364 - DNA, 25 bp, Artificial Sequence
  Description of Artificial Sequence: Synthetic probe
ccctcttccggaagctgatctgtac

SEQ ID NO: 365 - DNA, 25 bp, Artificial Sequence
  Description of Artificial Sequence: Synthetic probe
ggccagggtcctccatgactgggca

SEQ ID NO: 366 - DNA, 25 bp, Artificial Sequence
  Description of Artificial Sequence: Synthetic probe
gatctaccacacttgcaagccaggt

SEQ ID NO: 367 - DNA, 25 bp, Artificial Sequence
  Description of Artificial Sequence: Synthetic probe
tctaccacacttgcaagccaggtgg

SEQ ID NO: 368 - DNA, 25 bp, Artificial Sequence
  Description of Artificial Sequence: Synthetic probe
cctcctggatgaagacaggcgaggt

SEQ ID NO: 369 - DNA, 25 bp, Artificial Sequence
  Description of Artificial Sequence: Synthetic probe
agacaggcgaggtcctctgctcacg

SEQ ID NO: 370 - DNA, 25 bp, Artificial Sequence
  Description of Artificial Sequence: Synthetic probe
ctactctctgaacatgcttgtgcag

SEQ ID NO: 371 - DNA, 25 bp, Artificial Sequence
  Description of Artificial Sequence: Synthetic probe
cctctcttctgctggcttcagagac

SEQ ID NO: 372 - DNA, 25 bp, Artificial Sequence
  Description of Artificial Sequence: Synthetic probe
gcttcagagacttccagtttaagaa

SEQ ID NO: 373 - DNA, 25 bp, Artificial Sequence
  Description of Artificial Sequence: Synthetic probe
ggaaataactgtttcttgtgacctg

SEQ ID NO: 374 - DNA, 25 bp, Artificial Sequence
  Description of Artificial Sequence: Synthetic probe
tcttgtgacctggaactaacgtcaa

SEQ ID NO: 375 - DNA, 506 bp, Homo sapiens
  modified_base (290)..(389): a, c, g, t, unknown or other
tacctaaggaattcagccaactttgtttctatcatcagataatctcagaaaatagtgtgttttatctatattactgcctcttttcaatatttaagagaataattgtcttctggtttctactgagcctagtaataatcactaaagacctaaaaaaggaattccttctgttaagagtatttggatagcccattcacgataatggtggtgtgaaaatcaatcatcccagcttttctgacatatctaaattttgaataattaatttccacttccaaaaaattcaaatgttttcnnnnnnnnnnnnnnnnnnnnnnnnnnnnnnnnnnnnnnnnnnnnnnnnnnnnnnnnnnnnnnnnnnnnnnnnnnnnnnnnnnnnnnnnnnnnnnnnnnnnctctttgaacattatttttatttgtaaaatgagggagttggtttgttatgatgggaaatgagtcagttttcagggtcctgagaaaattgcttcattcatggctgtgtttgagataac

SEQ ID NO: 376 - DNA, 25 bp, Artificial Sequence
  Description of Artificial Sequence: Synthetic probe
tacctaaggaattcagccaactttg

SEQ ID NO: 377 - DNA, 25 bp, Artificial Sequence
  Description of Artificial Sequence: Synthetic probe
cctaaggaattcagccaactttgtt

SEQ ID NO: 378 - DNA, 25 bp, Artificial Sequence
  Description of Artificial Sequence: Synthetic probe
catcagataatctcagaaaatagtg

SEQ ID NO: 379 - DNA, 25 bp, Artificial Sequence
  Description of Artificial Sequence: Synthetic probe
taattgtcttctggtttctactgag

SEQ ID NO: 380 - DNA, 25 bp, Artificial Sequence
  Description of Artificial Sequence: Synthetic probe
ttgtcttctggtttctactgagcct

SEQ ID NO: 381 - DNA, 25 bp, Artificial Sequence
  Description of Artificial Sequence: Synthetic probe
tcttctggtttctactgagcctagt

SEQ ID NO: 382 - DNA, 25 bp, Artificial Sequence
  Description of Artificial Sequence: Synthetic probe
tggtttctactgagcctagtaataa

SEQ ID NO: 383 - DNA, 25 bp, Artificial Sequence
  Description of Artificial Sequence: Synthetic probe
tttggatagcccattcacgataatg

SEQ ID NO: 384 - DNA, 25 bp, Artificial Sequence
  Description of Artificial Sequence: Synthetic probe
ggatagcccattcacgataatggtg

SEQ ID NO: 385 - DNA, 25 bp, Artificial Sequence
  Description of Artificial Sequence: Synthetic probe
tagcccattcacgataatggtggtg

SEQ ID NO: 386 - DNA, 25 bp, Artificial Sequence
  Description of Artificial Sequence: Synthetic probe
ccattcacgataatggtggtgtgaa

SEQ ID NO: 387 - DNA, 25 bp, Artificial Sequence
  Description of Artificial Sequence: Synthetic probe
ttcagggtcctgagaaaattgcttc

SEQ ID NO: 388 - DNA, 25 bp, Artificial Sequence
  Description of Artificial Sequence: Synthetic probe
tcagggtcctgagaaaattgcttca

SEQ ID NO: 389 - DNA, 25 bp, Artificial Sequence
  Description of Artificial Sequence: Synthetic probe
attgcttcattcatggctgtgtttg

SEQ ID NO: 390 - DNA, 25 bp, Artificial Sequence
  Description of Artificial Sequence: Synthetic probe
ttgcttcattcatggctgtgtttga

SEQ ID NO: 391 - DNA, 25 bp, Artificial Sequence
  Description of Artificial Sequence: Synthetic probe
cattcatggctgtgtttgagataac

SEQ ID NO: 392 - DNA, 489 bp, Homo sapiens
  modified_base (252)..(252): a, c, g, t, unknown or other
  modified_base (326)..(326): a, c, g, t, unknown or other
  modified_base (425)..(453): a, c, g, t, unknown or other
caagaactaaatgtgcccgaaagtccagatcgaaagaaaagaaaaaggagaaagatatctgttcaagctcaaaaaggagatttcagaaaaatattcaccgaagaggaaaacccaaaagtgacactgtggattttcactgttctaagctccccgtgacctgtggtgaggcgaaagggattttatataagaagaaaatgaaacacggatcctcagtgaagtgcattcggaatgaggatggaacttggttaacanccaaatgaatttgaagtcgaaggaaaaggaaggaacgcaaagaactggaaacggaatatacgttgtgaaggaangaccctaggagagctgctgaagagtggacttttgctctgtcctccaagaataaatctcaagagagagttaaatagcaagtgaatttctactaccctctnnnnnnnnnnnnnnnnnnnnnnnnnnnnntggaggctcaccttagagcttctgagtttccaagct

SEQ ID NO: 393 - DNA, 25 bp, Artificial Sequence
  Description of Artificial Sequence: Synthetic probe
caagaactaaatgtgcccgaaagtc

SEQ ID NO: 394 - DNA, 25 bp, Artificial Sequence
  Description of Artificial Sequence: Synthetic probe
gcccgaaagtccagatcgaaagaaa

SEQ ID NO: 395 - DNA, 25 bp, Artificial Sequence
  Description of Artificial Sequence: Synthetic probe
aagatatctgttcaagctcaaaaag

SEQ ID NO: 396 - DNA, 25 bp, Artificial Sequence
  Description of Artificial Sequence: Synthetic probe
gttcaagctcaaaaaggagatttca

SEQ ID NO: 397 - DNA, 25 bp, Artificial Sequence
  Description of Artificial Sequence: Synthetic probe
aggaaaacccaaaagtgacactgtg

SEQ ID NO: 398 - DNA, 25 bp, Artificial Sequence
  Description of Artificial Sequence: Synthetic probe
ccccgtgacctgtggtgaggcgaaa

SEQ ID NO: 399 - DNA, 25 bp, Artificial Sequence
  Description of Artificial Sequence: Synthetic probe
aatgaaacacggatcctcagtgaag

SEQ ID NO: 400 - DNA, 25 bp, Artificial Sequence
  Description of Artificial Sequence: Synthetic probe
cctcagtgaagtgcattcggaatga

SEQ ID NO: 401 - DNA, 25 bp, Artificial Sequence
  Description of Artificial Sequence: Synthetic probe
gaccctaggagagctgctgaagagt

SEQ ID NO: 402 - DNA, 25 bp, Artificial Sequence
  Description of Artificial Sequence: Synthetic probe
agctgctgaagagtggacttttgct

SEQ ID NO: 403 - DNA, 25 bp, Artificial Sequence
  Description of Artificial Sequence: Synthetic probe
gtcctccaagaataaatctcaagag

SEQ ID NO: 404 - DNA, 25 bp, Artificial Sequence
  Description of Artificial Sequence: Synthetic probe
ctccaagaataaatctcaagagaga

SEQ ID NO: 405 - DNA, 25 bp, Artificial Sequence
  Description of Artificial Sequence: Synthetic probe
tggaggctcaccttagagcttctga

SEQ ID NO: 406 - DNA, 25 bp, Artificial Sequence
  Description of Artificial Sequence: Synthetic probe
gctcaccttagagcttctgagtttc

SEQ ID NO: 407 - DNA, 25 bp, Artificial Sequence
  Description of Artificial Sequence: Synthetic probe
caccttagagcttctgagtttccaa

SEQ ID NO: 408 - DNA, 25 bp, Artificial Sequence
  Description of Artificial Sequence: Synthetic probe
cttagagcttctgagtttccaagct

SEQ ID NO: 409 - DNA, 542 bp, Homo sapiens
  modified_base (31)..(31): a, c, g, t, unknown or other
  modified_base (55)..(55): a, c, g, t, unknown or other
  modified_base (66)..(66): a, c, g, t, unknown or other
  modified_base (72)..(72): a, c, g, t, unknown or other
  modified_base (97)..(97): a, c, g, t, unknown or other
  modified_base (99)..(99): a, c, g, t, unknown or other
  modified_base (176)..(176): a, c, g, t, unknown or other
  modified_base (229)..(229): a, c, g, t, unknown or other
  modified_base (273)..(273): a, c, g, t, unknown or other
  modified_base (286)..(286): a, c, g, t, unknown or other
  modified_base (298)..(298): a, c, g, t, unknown or other
  modified_base (308)..(308): a, c, g, t, unknown or other
  modified_base (323)..(386): a, c, g, t, unknown or other
  modified_base (458)..(459): a, c, g, t, unknown or other
ggccagactatcaggcccatttgtctccccntgcaccgagggaacaactcgagcntttgaggcttncctccnaactaccacttgccagcaacaaaangnaagagctgctccctgcacaggatatcaaagctctgtttgtgtctgaggaggagaaaaagctgactcggaaggaggtnctacatcaagaatggggataagaaaggcagctgtgagagagatgctcaatatngccccaggctatgacaaagtcaaggacatctcagaggtggtcancccctcggttccntttgtactgganggagtgagtnccctatgctgacccnnnnnnnnnnnnnnnnnnnnnnnnnnnnnnnnnnnnnnnnnnnnnnnnnnnnnnnnnnnnnnnnttcaagttggtgtaatcagctggggagtagtggatgtctgcaaaaaccagaagcggcaaaagcaggtacctnntcacgcccgagactttcacatcaacctctttcaagtgctgccctggctgaaggagaaactccaagatgaggatttgggttttc

SEQ ID NO: 410 - DNA, 25 bp, Artificial Sequence
  Description of Artificial Sequence: Synthetic probe
ggccagactatcaggcccatttgtc

SEQ ID NO: 411 - DNA, 25 bp, Artificial Sequence
  Description of Artificial Sequence: Synthetic probe
agagctgctccctgcacaggatatc

SEQ ID NO: 412 - DNA, 25 bp, Artificial Sequence
  Description of Artificial Sequence: Synthetic probe
ctccctgcacaggatatcaaagctc

SEQ ID NO: 413 - DNA, 25 bp, Artificial Sequence
  Description of Artificial Sequence: Synthetic probe
cctgcacaggatatcaaagctctgt

SEQ ID NO: 414 - DNA, 25 bp, Artificial Sequence
  Description of Artificial Sequence: Synthetic probe
gatatcaaagctctgtttgtgtctg

SEQ ID NO: 415 - DNA, 25 bp, Artificial Sequence
  Description of Artificial Sequence: Synthetic probe
tatcaaagctctgtttgtgtctgag

SEQ ID NO: 416 - DNA, 25 bp, Artificial Sequence
  Description of Artificial Sequence: Synthetic probe
aaaggcagctgtgagagagatgctc

SEQ ID NO: 417 - DNA, 25 bp, Artificial Sequence
  Description of Artificial Sequence: Synthetic probe
aggcagctgtgagagagatgctcaa

SEQ ID NO: 418 - DNA, 25 bp, Artificial Sequence
  Description of Artificial Sequence: Synthetic probe
agtcaaggacatctcagaggtggtc

SEQ ID NO: 419 - DNA, 25 bp, Artificial Sequence
  Description of Artificial Sequence: Synthetic probe
gtcaaggacatctcagaggtggtca

SEQ ID NO: 420 - DNA, 25 bp, Artificial Sequence
  Description of Artificial Sequence: Synthetic probe
tggatgtctgcaaaaaccagaagcg

SEQ ID NO: 421 - DNA, 25 bp, Artificial Sequence
  Description of Artificial Sequence: Synthetic probe
tcaacctctttcaagtgctgccctg

SEQ ID NO: 422 - DNA, 25 bp, Artificial Sequence
  Description of Artificial Sequence: Synthetic probe
caacctctttcaagtgctgccctgg

SEQ ID NO: 423 - DNA, 25 bp, Artificial Sequence
  Description of Artificial Sequence: Synthetic probe
cctctttcaagtgctgccctggctg

SEQ ID NO: 424 - DNA, 25 bp, Artificial Sequence
  Description of Artificial Sequence: Synthetic probe
caagtgctgccctggctgaaggaga

SEQ ID NO: 425 - DNA, 25 bp, Artificial Sequence
  Description of Artificial Sequence: Synthetic probe
ctccaagatgaggatttgggttttc

SEQ ID NO: 426 - DNA, 569 bp, Homo sapiens
  modified_base (103)..(122): a, c, g, t, unknown or other
agtcattgaatctcttatgccagttttcataaaacccaaaccacatatgaaaaaatccattaagggtccaagaagtctgtccatatgaaaatgagggtaaatnnnnnnnnnnnnnnnnnnnncagtcattataattgatataatagctctaacatgcaatataaaattcataggagtattaatagcccatttacacatctataaaatgtaatgggattgcagagctgcagagtacagtgtaacagtactctcatgcaatttttttcaggatgcaaaggcaattattctttgtaagcgggacatttagaatatatttgtgtacatattatatgtatgtatatttcaaagtaccacactgaaaattagacatttattaaccaaatttaacgtggtatttaaaggtaatatttttaatatgatacattacatattgtgaatgtatactaaaaaaacattttaaatgttaaaattataatttcagattcatataaccacaactgtgatatatcctaactataaccagttgttgaggggtatactagaagcagaatgaaaccacattttttggt

SEQ ID NO: 427 - DNA, 25 bp, Artificial Sequence
  Description of Artificial Sequence: Synthetic probe
agtcattgaatctcttatgccagtt

SEQ ID NO: 428 - DNA, 25 bp, Artificial Sequence
  Description of Artificial Sequence: Synthetic probe
gtcattgaatctcttatgccagttt

SEQ ID NO: 429 - DNA, 25 bp, Artificial Sequence
  Description of Artificial Sequence: Synthetic probe
atccattaagggtccaagaagtctg

SEQ ID NO: 430 - DNA, 25 bp, Artificial Sequence
  Description of Artificial Sequence: Synthetic probe
ccattaagggtccaagaagtctgtc

SEQ ID NO: 431 - DNA, 25 bp, Artificial Sequence
  Description of Artificial Sequence: Synthetic probe
ttaagggtccaagaagtctgtccat

SEQ ID NO: 432 - DNA, 25 bp, Artificial Sequence
  Description of Artificial Sequence: Synthetic probe
gggtccaagaagtctgtccatatga

SEQ ID NO: 433 - DNA, 25 bp, Artificial Sequence
  Description of Artificial Sequence: Synthetic probe
tccaagaagtctgtccatatgaaaa

SEQ ID NO: 434 - DNA, 25 bp, Artificial Sequence
  Description of Artificial Sequence: Synthetic probe
caagaagtctgtccatatgaaaatg

SEQ ID NO: 435 - DNA, 25 bp, Artificial Sequence
  Description of Artificial Sequence: Synthetic probe
atgggattgcagagctgcagagtac

SEQ ID NO: 436 - DNA, 25 bp, Artificial Sequence
  Description of Artificial Sequence: Synthetic probe
ggattgcagagctgcagagtacagt

SEQ ID NO: 437 - DNA, 25 bp, Artificial Sequence
  Description of Artificial Sequence: Synthetic probe
gagctgcagagtacagtgtaacagt

SEQ ID NO: 438 - DNA, 25 bp, Artificial Sequence
  Description of Artificial Sequence: Synthetic probe
acagtgtaacagtactctcatgcaa

SEQ ID NO: 439 - DNA, 25 bp, Artificial Sequence
  Description of Artificial Sequence: Synthetic probe
gtgtaacagtactctcatgcaattt

SEQ ID NO: 440 - DNA, 25 bp, Artificial Sequence
  Description of Artificial Sequence: Synthetic probe
atcctaactataaccagttgttgag

SEQ ID NO: 441 - DNA, 25 bp, Artificial Sequence
  Description of Artificial Sequence: Synthetic probe
ctaactataaccagttgttgagggg

SEQ ID NO: 442 - DNA, 25 bp, Artificial Sequence
  Description of Artificial Sequence: Synthetic probe
gcagaatgaaaccacattttttggt

SEQ ID NO: 443 - DNA, 612 bp, Homo sapiens
  modified_base (211)..(225): a, c, g, t, unknown or other
ctgtacatgggaacacagagacttaatatcacgtccaaatttatctgtgatttatgcacatgtacgagaccaaacatgtgtgtctacatacctacccaggaggacgccacctccagtaaattcacctatttcaatcacatcatattattcagctgaagacagagatgaaacatttgtacaagatggttccatgtgtggtcctgatatgtannnnnnnnnnnnnnnttgtaaacatgttagattcctgatgaatttaaaattgtgtgatgcttctaatcattgtgatcgtcatggagtttgcaacaattttaaccattgccattgtgaaaagggatataatcctccttactgccaaccaaagcaaggagcatttggaagtattgatgatggacgcttagtaccaccaactgagagaagttacatggaggagggaagataggccacttttcaaaaacaacggtttcaactcattttctacatttctctacctgtgcttcttattactactgccattttaataaaacagaaaaaattgagagagctatgctatagaggggaaaatgaaagtgagagctctgtgtcagaagaaagcagcagtaacagcaagtcatc

SEQ ID NO: 444 - DNA, 25 bp, Artificial Sequence
  Description of Artificial Sequence: Synthetic probe
ctgtacatgggaacacagagactta

SEQ ID NO: 445 - DNA, 25 bp, Artificial Sequence
  Description of Artificial Sequence: Synthetic probe
cgtccaaatttatctgtgatttatg

SEQ ID NO: 446 - DNA, 25 bp, Artificial Sequence
  Description of Artificial Sequence: Synthetic probe
gtctacatacctacccaggaggacg

SEQ ID NO: 447 - DNA, 25 bp, Artificial Sequence
  Description of Artificial Sequence: Synthetic probe
tcatattattcagctgaagacagag

SEQ ID NO: 448 - DNA, 25 bp, Artificial Sequence
  Description of Artificial Sequence: Synthetic probe
ttcagctgaagacagagatgaaaca

SEQ ID NO: 449 - DNA, 25 bp, Artificial Sequence
  Description of Artificial Sequence: Synthetic probe
aacatttgtacaagatggttccatg

SEQ ID NO: 450 - DNA, 25 bp, Artificial Sequence
  Description of Artificial Sequence: Synthetic probe
gttccatgtgtggtcctgatatgta

SEQ ID NO: 451 - DNA, 25 bp, Artificial Sequence
  Description of Artificial Sequence: Synthetic probe
tgtgatgcttctaatcattgtgatc

SEQ ID NO: 452 - DNA, 25 bp, Artificial Sequence
  Description of Artificial Sequence: Synthetic probe
tcgtcatggagtttgcaacaatttt

SEQ ID NO: 453 - DNA, 25 bp, Artificial Sequence
  Description of Artificial Sequence: Synthetic probe
ttaaccattgccattgtgaaaaggg

SEQ ID NO: 454 - DNA, 25 bp, Artificial Sequence
  Description of Artificial Sequence: Synthetic probe
ccaaagcaaggagcatttggaagta

SEQ ID NO: 455 - DNA, 25 bp, Artificial Sequence
  Description of Artificial Sequence: Synthetic probe
tattgatgatggacgcttagtacca

SEQ ID NO: 456 - DNA, 25 bp, Artificial Sequence
  Description of Artificial Sequence: Synthetic probe
ccaccaactgagagaagttacatgg

SEQ ID NO: 457 - DNA, 25 bp, Artificial Sequence
  Description of Artificial Sequence: Synthetic probe
gaagataggccacttttcaaaaaca

SEQ ID NO: 458 - DNA, 25 bp, Artificial Sequence
  Description of Artificial Sequence: Synthetic probe
tgagagctctgtgtcagaagaaagc

SEQ ID NO: 459 - DNA, 25 bp, Artificial Sequence
  Description of Artificial Sequence: Synthetic probe
aaagcagcagtaacagcaagtcatc

SEQ ID NO: 460 - DNA, 258 bp, Homo sapiens
agatcttaggcaaaataccagctgatgaaggcatctgatgccttcatctgttcagtcatctccaaaaacagtaaaaataaccactttttgttgggcaatatgaaatttttaaaggagtagaataccaaatgatagaaacagactgcctgaattgagaattttgattttttaaagtgtgtttctttctaaattgctgttccttaatttgattaatttaattcatgtattatgattaaatctgaggcagatgagcttaca

SEQ ID NO: 461 - DNA, 25 bp, Artificial Sequence
  Description of Artificial Sequence: Synthetic probe
agatcttaggcaaaataccagctga

SEQ ID NO: 462 - DNA, 25 bp, Artificial Sequence
  Description of Artificial Sequence: Synthetic probe
atcttaggcaaaataccagctgatg

SEQ ID NO: 463 - DNA, 25 bp, Artificial Sequence
  Description of Artificial Sequence: Synthetic probe
gcaaaataccagctgatgaaggcat

SEQ ID NO: 464 - DNA, 25 bp, Artificial Sequence
  Description of Artificial Sequence: Synthetic probe
ataccagctgatgaaggcatctgat

SEQ ID NO: 465 - DNA, 25 bp, Artificial Sequence
  Description of Artificial Sequence: Synthetic probe
gaaggcatctgatgccttcatctgt

SEQ ID NO: 466 - DNA, 25 bp, Artificial Sequence
  Description of Artificial Sequence: Synthetic probe
atctgatgccttcatctgttcagtc

SEQ ID NO: 467 - DNA, 25 bp, Artificial Sequence
  Description of Artificial Sequence: Synthetic probe
tctgatgccttcatctgttcagtca

SEQ ID NO: 468 - DNA, 25 bp, Artificial Sequence
  Description of Artificial Sequence: Synthetic probe
ctgatgccttcatctgttcagtcat

SEQ ID NO: 469 - DNA, 25 bp, Artificial Sequence
  Description of Artificial Sequence: Synthetic probe
gatgccttcatctgttcagtcatct

SEQ ID NO: 470 - DNA, 25 bp, Artificial Sequence
  Description of Artificial Sequence: Synthetic probe
tgatagaaacagactgcctgaattg

SEQ ID NO: 471 - DNA, 25 bp, Artificial Sequence
  Description of Artificial Sequence: Synthetic probe
gatagaaacagactgcctgaattga

SEQ ID NO: 472 - DNA, 25 bp, Artificial Sequence
  Description of Artificial Sequence: Synthetic probe
atagaaacagactgcctgaattgag

SEQ ID NO: 473 - DNA, 25 bp, Artificial Sequence
  Description of Artificial Sequence: Synthetic probe
aacagactgcctgaattgagaattt

SEQ ID NO: 474 - DNA, 25 bp, Artificial Sequence
  Description of Artificial Sequence: Synthetic probe
acagactgcctgaattgagaatttt

SEQ ID NO: 475 - DNA, 25 bp, Artificial Sequence
  Description of Artificial Sequence: Synthetic probe
cagactgcctgaattgagaattttg

SEQ ID NO: 476 - DNA, 25 bp, Artificial Sequence
  Description of Artificial Sequence: Synthetic probe
taaatctgaggcagatgagcttaca

SEQ ID NO: 477 - DNA, 551 bp, Homo sapiens
  modified_base (63)..(80): a, c, g, t, unknown or other
  modified_base (107)..(107): a, c, g, t, unknown or other
  modified_base (216)..(233): a, c, g, t, unknown or other
  modified_base (301)..(301): a, c, g, t, unknown or other
  modified_base (344)..(360): a, c, g, t, unknown or other
  modified_base (382)..(399): a, c, g, t, unknown or other
caacattcttgtgtctgttttactgttacaatattaggtgaatatggaagtaaaggcattccnnnnnnnnnnnnnnnnnnaaaaaagaattctggtcctgttttctnaaaaaaaaaaaactgttgtagaaattcttaatttggatctatttattagtcagagtttcagctttcttcagctgccagtgtgttactcatctttatcctaaaaatctgnnnnnnnnnnnnnnnnnntgttcacatatgattctcttagacacttttatatttgaaaaaattaaaatctttctttggggaaaaantcttggttattctgccataacagattatgtattaacttgtagnnnnnnnnnnnnnnnnnctgtttagttgcttgctaatannnnnnnnnnnnnnnnnngtattggtgaaagacggttggggatggggggatttttttgttcttgttgtacccttgttttgaaactagaaatctgtcctgtggcatgcaaaagaaagcaaattatttttaaaagaaaaaaaccaaagtacttttggtgtcattattccatc

SEQ ID NO: 478 - DNA, 25 bp, Artificial Sequence
  Description of Artificial Sequence: Synthetic probe
caacattcttgtgtctgttttactg

SEQ ID NO: 479 - DNA, 25 bp, Artificial Sequence
  Description of Artificial Sequence: Synthetic probe
tttattagtcagagtttcagctttc

SEQ ID NO: 480 - DNA, 25 bp, Artificial Sequence
  Description of Artificial Sequence: Synthetic probe
ttattagtcagagtttcagctttct

SEQ ID NO: 481 - DNA, 25 bp, Artificial Sequence
  Description of Artificial Sequence: Synthetic probe
attagtcagagtttcagctttcttc

SEQ ID NO: 482 - DNA, 25 bp, Artificial Sequence
  Description of Artificial Sequence: Synthetic probe
tcagctttcttcagctgccagtgtg

SEQ ID NO: 483 - DNA, 25 bp, Artificial Sequence
  Description of Artificial Sequence: Synthetic probe
cttcagctgccagtgtgttactcat

SEQ ID NO: 484 - DNA, 25 bp, Artificial Sequence
  Description of Artificial Sequence: Synthetic probe
cagctgccagtgtgttactcatctt

SEQ ID NO: 485 - DNA, 25 bp, Artificial Sequence
  Description of Artificial Sequence: Synthetic probe
agctgccagtgtgttactcatcttt

SEQ ID NO: 486 - DNA, 25 bp, Artificial Sequence
  Description of Artificial Sequence: Synthetic probe
gccagtgtgttactcatctttatcc

SEQ ID NO: 487 - DNA, 25 bp, Artificial Sequence
  Description of Artificial Sequence: Synthetic probe
tcttggttattctgccataacagat

SEQ ID NO: 488 - DNA, 25 bp, Artificial Sequence
  Description of Artificial Sequence: Synthetic probe
ggttattctgccataacagattatg

SEQ ID NO: 489 - DNA, 25 bp, Artificial Sequence
  Description of Artificial Sequence: Synthetic probe
gttattctgccataacagattatgt

SEQ ID NO: 490 - DNA, 25 bp, Artificial Sequence
  Description of Artificial Sequence: Synthetic probe
tgttgtacccttgttttgaaactag

SEQ ID NO: 491 - DNA, 25 bp, Artificial Sequence
  Description of Artificial Sequence: Synthetic probe
gaaatctgtcctgtggcatgcaaaa

SEQ ID NO: 492 - DNA, 25 bp, Artificial Sequence
  Description of Artificial Sequence: Synthetic probe
accaaagtacttttggtgtcattat

SEQ ID NO: 493 - DNA, 25 bp, Artificial Sequence
  Description of Artificial Sequence: Synthetic probe
gtacttttggtgtcattattccatc

SEQ ID NO: 494 - DNA, 589 bp, Homo sapiens
  modified_base (107)..(122): a, c, g, t, unknown or other
  modified_base (137)..(137): a, c, g, t, unknown or other
  modified_base (159)..(159): a, c, g, t, unknown or other
  modified_base (175)..(175): a, c, g, t, unknown or other
  modified_base (450)..(465): a, c, g, t, unknown or other
agagctgcctaatccccgaatcagctgcccagaaggcaccaatgcctatcgctcctactgctactactttaatgaagaccctgagacctgggttgatgcagatctcnnnnnnnnnnnnnnnnaattcaggcaacctnggtgtctgtgctcacccaggcnggagggtgccttcgtnggcctcactgattaaggagagtagcactgatgacagcaatgtctggattggcctccatgacccaaaaaagaaccgccgctggcactggagtagtgggtccctggtctcctacaagtcctgggacactggatccccgagcagtgctaatgctggctactgtgcaagcctgacttcatgctcaggattcaagaaatggaaggatgaatcttgtgagaagaagttctcctttgtttgcaagttcaaaaactagaggaagctgaaaaatggatgtctannnnnnnnnnnnnnnntactatgaagtcaaaaattaaactagactatgtctccaactcagttcagaccatctcctccctaatgagtttgcatcgctgatcttcagtaccttcacctgtctcagtctctagagccctgaaa

SEQ ID NO: 495 - DNA, 25 bp, Artificial Sequence
  Description of Artificial Sequence: Synthetic probe
agagctgcctaatccccgaatcagc

SEQ ID NO: 496 - DNA, 25 bp, Artificial Sequence
  Description of Artificial Sequence: Synthetic probe
taatccccgaatcagctgcccagaa

SEQ ID NO: 497 - DNA, 25 bp, Artificial Sequence
  Description of Artificial Sequence: Synthetic probe
actggatccccgagcagtgctaatg

SEQ ID NO: 498 - DNA, 25 bp, Artificial Sequence
  Description of Artificial Sequence: Synthetic probe
ttcatgctcaggattcaagaaatgg

SEQ ID NO: 499 - DNA, 25 bp, Artificial Sequence
  Description of Artificial Sequence: Synthetic probe
agactatgtctccaactcagttcag

SEQ ID NO: 500 - DNA, 25 bp, Artificial Sequence
  Description of Artificial Sequence: Synthetic probe
gactatgtctccaactcagttcaga

SEQ ID NO: 501 - DNA, 25 bp, Artificial Sequence
  Description of Artificial Sequence: Synthetic probe
tcctccctaatgagtttgcatcgct

SEQ ID NO: 502 - DNA, 25 bp, Artificial Sequence
  Description of Artificial Sequence: Synthetic probe
ctccctaatgagtttgcatcgctga

SEQ ID NO: 503 - DNA, 25 bp, Artificial Sequence
  Description of Artificial Sequence: Synthetic probe
aatgagtttgcatcgctgatcttca

SEQ ID NO: 504 - DNA, 25 bp, Artificial Sequence
  Description of Artificial Sequence: Synthetic probe
tgcatcgctgatcttcagtaccttc

SEQ ID NO: 505 - DNA, 25 bp, Artificial Sequence
  Description of Artificial Sequence: Synthetic probe
gcatcgctgatcttcagtaccttca

SEQ ID NO: 506 - DNA, 25 bp, Artificial Sequence
  Description of Artificial Sequence: Synthetic probe
gctgatcttcagtaccttcacctgt

SEQ ID NO: 507 - DNA, 25 bp, Artificial Sequence
  Description of Artificial Sequence: Synthetic probe
ccttcacctgtctcagtctctagag

SEQ ID NO: 508 - DNA, 25 bp, Artificial Sequence
  Description of Artificial Sequence: Synthetic probe
ttcacctgtctcagtctctagagcc

SEQ ID NO: 509 - DNA, 25 bp, Artificial Sequence
  Description of Artificial Sequence: Synthetic probe
acctgtctcagtctctagagccctg

SEQ ID NO: 510 - DNA, 25 bp, Artificial Sequence
  Description of Artificial Sequence: Synthetic probe
tgtctcagtctctagagccctgaaa

SEQ ID NO: 511 - DNA, 594 bp, Homo sapiens
  modified_base (53)..(53): a, c, g, t, unknown or other
  modified_base (117)..(117): a, c, g, t, unknown or other
  modified_base (353)..(375): a, c, g, t, unknown or other
  modified_base (480)..(507): a, c, g, t, unknown or other
gtctgatcgatcatgcagatacaatgttggtatttgagaggttagtttttttncctacacttttttttgccaactgacttaacaacattgctgtcaggtggaaatttcaagcacttntgcacatttagttcagtgtttgttgagaatccatggcttaacccacttgttttgctatttttttctttgcttttaattttccccatctgattttatctctgcgtttcagtgacctaccttaaaacaacacacgagaagagttaaactgggttcattttaatgatcaatttacctgcatataaaatttatttttaatcaagctgatcttaatgtatataatcattctatttgctttnnnnnnnnnnnnnnnnnnnnnnnaacaccacttcttttcatctgtaccacaccctggtgaaacctttgaagacataaaaaaaacctgtctgagatgttctttctaccaatctatatgtctttcggttnnnnnnnnnnnnnnnnnnnnnnnnnnnngtaaatgctgatattgatttcactggtccatctatatttaaaacgtgcaagaaaaaaataaaatactctgctctagcaagttttgtg

SEQ ID NO: 512 - DNA, 25 bp, Artificial Sequence
  Description of Artificial Sequence: Synthetic probe
gtctgatcgatcatgcagatacaat

SEQ ID NO: 513 - DNA, 25 bp, Artificial Sequence
  Description of Artificial Sequence: Synthetic probe
cgatcatgcagatacaatgttggta

SEQ ID NO: 514 - DNA, 25 bp, Artificial Sequence
  Description of Artificial Sequence: Synthetic probe
gccaactgacttaacaacattgctg

SEQ ID NO: 515 - DNA, 25 bp, Artificial Sequence
  Description of Artificial Sequence: Synthetic probe
cattgctgtcaggtggaaatttcaa

SEQ ID NO: 516 - DNA, 25 bp, Artificial Sequence
  Description of Artificial Sequence: Synthetic probe
atctctgcgtttcagtgacctacct

SEQ ID NO: 517 - DNA, 25 bp, Artificial Sequence
  Description of Artificial Sequence: Synthetic probe
acaacacacgagaagagttaaactg

SEQ ID NO: 518 - DNA, 25 bp, Artificial Sequence
  Description of Artificial Sequence: Synthetic probe
caacacacgagaagagttaaactgg

SEQ ID NO: 519 - DNA, 25 bp, Artificial Sequence
  Description of Artificial Sequence: Synthetic probe
cacaccctggtgaaacctttgaaga

SEQ ID NO: 520 - DNA, 25 bp, Artificial Sequence
  Description of Artificial Sequence: Synthetic probe
caccctggtgaaacctttgaagaca

SEQ ID NO: 521 - DNA, 25 bp, Artificial Sequence
  Description of Artificial Sequence: Synthetic probe
aacctgtctgagatgttctttctac

SEQ ID NO: 522 - DNA, 25 bp, Artificial Sequence
  Description of Artificial Sequence: Synthetic probe
acctgtctgagatgttctttctacc

SEQ ID NO: 523 - DNA, 25 bp, Artificial Sequence
  Description of Artificial Sequence: Synthetic probe
gtctgagatgttctttctaccaatc

SEQ ID NO: 524 - DNA, 25 bp, Artificial Sequence
  Description of Artificial Sequence: Synthetic probe
tgctgatattgatttcactggtcca

SEQ ID NO: 525 - DNA, 25 bp, Artificial Sequence
  Description of Artificial Sequence: Synthetic probe
tgatattgatttcactggtccatct

SEQ ID NO: 526 - DNA, 25 bp, Artificial Sequence
  Description of Artificial Sequence: Synthetic probe
gatattgatttcactggtccatcta

SEQ ID NO: 527 - DNA, 25 bp, Artificial Sequence
  Description of Artificial Sequence: Synthetic probe
atactctgctctagcaagttttgtg

SEQ ID NO: 528 - DNA, 111 bp, Homo sapiens
tgttaagacctcctattgagttttccaggtcctcagatgggaattgcacagtaggatgtggaacctgtttaatgttatgaggacgtgtctgttatttcctaatcaaaaagg

SEQ ID NO: 529 - DNA, 25 bp, Artificial Sequence
  Description of Artificial Sequence: Synthetic probe
tgttaagacctcctattgagttttc

SEQ ID NO: 530 - DNA, 25 bp, Artificial Sequence
  Description of Artificial Sequence: Synthetic probe
taagacctcctattgagttttccag

SEQ ID NO: 531 - DNA, 25 bp, Artificial Sequence
  Description of Artificial Sequence: Synthetic probe
gacctcctattgagttttccaggtc

SEQ ID NO: 532 - DNA, 25 bp, Artificial Sequence
  Description of Artificial Sequence: Synthetic probe
cctcctattgagttttccaggtcct

SEQ ID NO: 533 - DNA, 25 bp, Artificial Sequence
  Description of Artificial Sequence: Synthetic probe
ctattgagttttccaggtcctcaga

SEQ ID NO: 534 - DNA, 25 bp, Artificial Sequence
  Description of Artificial Sequence: Synthetic probe
tattgagttttccaggtcctcagat

SEQ ID NO: 535 - DNA, 25 bp, Artificial Sequence
  Description of Artificial Sequence: Synthetic probe
ccaggtcctcagatgggaattgcac

SEQ ID NO: 536 - DNA, 25 bp, Artificial Sequence
  Description of Artificial Sequence: Synthetic probe
caggtcctcagatgggaattgcaca

SEQ ID NO: 537 - DNA, 25 bp, Artificial Sequence
  Description of Artificial Sequence: Synthetic probe
tcctcagatgggaattgcacagtag

SEQ ID NO: 538 - DNA, 25 bp, Artificial Sequence
  Description of Artificial Sequence: Synthetic probe
gaattgcacagtaggatgtggaacc

SEQ ID NO: 539 - DNA, 25 bp, Artificial Sequence
  Description of Artificial Sequence: Synthetic probe
ttgcacagtaggatgtggaacctgt

SEQ ID NO: 540 - DNA, 25 bp, Artificial Sequence
  Description of Artificial Sequence: Synthetic probe
ttatgaggacgtgtctgttatttcc

SEQ ID NO: 541 - DNA, 25 bp, Artificial Sequence
  Description of Artificial Sequence: Synthetic probe
tgaggacgtgtctgttatttcctaa

SEQ ID NO: 542 - DNA, 25 bp, Artificial Sequence
  Description of Artificial Sequence: Synthetic probe
aggacgtgtctgttatttcctaatc

SEQ ID NO: 543 - DNA, 25 bp, Artificial Sequence
  Description of Artificial Sequence: Synthetic probe
gacgtgtctgttatttcctaatcaa

SEQ ID NO: 544 - DNA, 25 bp, Artificial Sequence
  Description of Artificial Sequence: Synthetic probe
gtctgttatttcctaatcaaaaagg

SEQ ID NO: 545 - DNA, 62 bp, Homo sapiens
gccattcctgcagataagcaggactgccgcagtgtctattcctgtcctgtgtacaagactag

SEQ ID NO: 546 - DNA, 25 bp, Artificial Sequence
  Description of Artificial Sequence: Synthetic probe
gccattcctgcagataagcaggact

SEQ ID NO: 547 - DNA, 25 bp, Artificial Sequence
  Description of Artificial Sequence: Synthetic probe
attcctgcagataagcaggactgcc

SEQ ID NO: 548 - DNA, 25 bp, Artificial Sequence
  Description of Artificial Sequence: Synthetic probe
tcctgcagataagcaggactgccgc

SEQ ID NO: 549 - DNA, 25 bp, Artificial Sequence
  Description of Artificial Sequence: Synthetic probe
cagataagcaggactgccgcagtgt

SEQ ID NO: 550 - DNA, 25 bp, Artificial Sequence
  Description of Artificial Sequence: Synthetic probe
agataagcaggactgccgcagtgtc

SEQ ID NO: 551 - DNA, 25 bp, Artificial Sequence
  Description of Artificial Sequence: Synthetic probe
gataagcaggactgccgcagtgtct

SEQ ID NO: 552 - DNA, 25 bp, Artificial Sequence
  Description of Artificial Sequence: Synthetic probe
caggactgccgcagtgtctattcct

SEQ ID NO: 553 - DNA, 25 bp, Artificial Sequence
  Description of Artificial Sequence: Synthetic probe
tgccgcagtgtctattcctgtcctg

SEQ ID NO: 554 - DNA, 25 bp, Artificial Sequence
  Description of Artificial Sequence: Synthetic probe
gccgcagtgtctattcctgtcctgt

SEQ ID NO: 555 - DNA, 25 bp, Artificial Sequence
  Description of Artificial Sequence: Synthetic probe
ccgcagtgtctattcctgtcctgtg

SEQ ID NO: 556 - DNA, 25 bp, Artificial Sequence
  Description of Artificial Sequence: Synthetic probe
cgcagtgtctattcctgtcctgtgt

SEQ ID NO: 557 - DNA, 25 bp, Artificial Sequence
  Description of Artificial Sequence: Synthetic probe
cagtgtctattcctgtcctgtgtac

SEQ ID NO: 558 - DNA, 25 bp, Artificial Sequence
  Description of Artificial Sequence: Synthetic probe
agtgtctattcctgtcctgtgtaca

SEQ ID NO: 559 - DNA, 25 bp, Artificial Sequence
  Description of Artificial Sequence: Synthetic probe
gtgtctattcctgtcctgtgtacaa

SEQ ID NO: 560 - DNA, 25 bp, Artificial Sequence
  Description of Artificial Sequence: Synthetic probe
tgtctattcctgtcctgtgtacaag

SEQ ID NO: 561 - DNA, 25 bp, Artificial Sequence
  Description of Artificial Sequence: Synthetic probe
attcctgtcctgtgtacaagactag

SEQ ID NO: 562 - DNA, 423 bp, Homo sapiens
  modified_base (334)..(334): a, c, g, t, unknown or other
  modified_base (382)..(383): a, c, g, t, unknown or other
  modified_base (387)..(387): a, c, g, t, unknown or other
gatgccagtaatcaatattgaggacctgacagaaaaggacaaattgaagatggaagttgaccagctcaagaaagaagtgacactggaaagaatgctagtttccaaatgttgtgaagaagtaagagattacgttgaagaacgatctggcgaggatccactggtaaagggcatcccagaggacaaaaatcccttcaaggagctcaaaggaggctgtgtgatttcataatacaaacaaaaagaaaaaaaattaaacaaattcttggaaatatctcaaatgttaataacaatatgaatttttctcatgcatactattactactaagcatgtacgtgantttttaaatttatagatgtaaacttttaataaaaattggggtgtggtnncccntcattctatgtttttcttagcatagctggcacaggg

SEQ ID NO: 563 - DNA, 25 bp, Artificial Sequence
  Description of Artificial Sequence: Synthetic probe
gatgccagtaatcaatattgaggac

SEQ ID NO: 564 - DNA, 25 bp, Artificial Sequence
  Description of Artificial Sequence: Synthetic probe
ttgaggacctgacagaaaaggacaa

SEQ ID NO: 565 - DNA, 25 bp, Artificial Sequence
  Description of Artificial Sequence: Synthetic probe
tgaggacctgacagaaaaggacaaa

SEQ ID NO: 566 - DNA, 25 bp, Artificial Sequence
  Description of Artificial Sequence: Synthetic probe
tggaagttgaccagctcaagaaaga

SEQ ID NO: 567 - DNA, 25 bp, Artificial Sequence
  Description of Artificial Sequence: Synthetic probe
gttgaccagctcaagaaagaagtga

SEQ ID NO: 568 - DNA, 25 bp, Artificial Sequence
  Description of Artificial Sequence: Synthetic probe
gaccagctcaagaaagaagtgacac

SEQ ID NO: 569 - DNA, 25 bp, Artificial Sequence
  Description of Artificial Sequence: Synthetic probe
accagctcaagaaagaagtgacact

SEQ ID NO: 570 - DNA, 25 bp, Artificial Sequence
  Description of Artificial Sequence: Synthetic probe
cgaggatccactggtaaagggcatc

SEQ ID NO: 571 - DNA, 25 bp, Artificial Sequence
  Description of Artificial Sequence: Synthetic probe
aaagggcatcccagaggacaaaaat

SEQ ID NO: 572 - DNA, 25 bp, Artificial Sequence
  Description of Artificial Sequence: Synthetic probe
gggcatcccagaggacaaaaatccc

SEQ ID NO: 573 - DNA, 25 bp, Artificial Sequence
  Description of Artificial Sequence: Synthetic probe
atcccttcaaggagctcaaaggagg

SEQ ID NO: 574 - DNA, 25 bp, Artificial Sequence
  Description of Artificial Sequence: Synthetic probe
cttcaaggagctcaaaggaggctgt

SEQ ID NO: 575 - DNA, 25 bp, Artificial Sequence
  Description of Artificial Sequence: Synthetic probe
ctcaaaggaggctgtgtgatttcat

SEQ ID NO: 576 - DNA, 25 bp, Artificial Sequence
  Description of Artificial Sequence: Synthetic probe
actattactactaagcatgtacgtg

SEQ ID NO: 577 - DNA, 25 bp, Artificial Sequence
  Description of Artificial Sequence: Synthetic probe
ctattactactaagcatgtacgtga

SEQ ID NO: 578 - DNA, 25 bp, Artificial Sequence
  Description of Artificial Sequence: Synthetic probe
ttttcttagcatagctggcacaggg

SEQ ID NO: 579 - DNA, 403 bp, Homo sapiens
  modified_base (35)..(61): a, c, t, g, unknown or other
  modified_base (127)..(165): a, c, t, g, unknown or other
gtttaacatccagcactgtaagaagctgtccagcnnnnnnnnnnnnnnnnnnnnnnnnnnnaatgccaccgccatcttcttcctgcctgatgaggggaaactacagcacctggaaaatgaactcacnnnnnnnnnnnnnnnnnnnnnnnnnnnnnnnnnnnnnnnaaggtctgccagcttacatttacccaaactgtccattactggaacctatgatctgaagagcgtcctgggtcaactgggcatcactaaggtcttcagcaatggggctgacctctccggggtcacagaggaggcacccctgaagctctccaaggccgtgcataaggctgtgctgaccatcgacgagaaagggactgaagctgctggggccatgtttttagaggccatacccatgtctatc

SEQ ID NO: 580 - DNA, 25 bp, Artificial Sequence
  Description of Artificial Sequence: Synthetic probe
gtttaacatccagcactgtaagaag

SEQ ID NO: 581 - DNA, 25 bp, Artificial Sequence
  Description of Artificial Sequence: Synthetic probe
cttcctgcctgatgaggggaaacta

SEQ ID NO: 582 - DNA, 25 bp, Artificial Sequence
  Description of Artificial Sequence: Synthetic probe
tggaacctatgatctgaagagcgtc

SEQ ID NO: 583 - DNA, 25 bp, Artificial Sequence
  Description of Artificial Sequence: Synthetic probe
gtcaactgggcatcactaaggtctt

SEQ ID NO: 584 - DNA, 25 bp, Artificial Sequence
  Description of Artificial Sequence: Synthetic probe
tcaactgggcatcactaaggtcttc

SEQ ID NO: 585 - DNA, 25 bp, Artificial Sequence
  Description of Artificial Sequence: Synthetic probe
cagcaatggggctgacctctccggg

SEQ ID NO: 586 - DNA, 25 bp, Artificial Sequence
  Description of Artificial Sequence: Synthetic probe
cgtgcataaggctgtgctgaccatc

SEQ ID NO: 587 - DNA, 25 bp, Artificial Sequence
  Description of Artificial Sequence: Synthetic probe
taaggctgtgctgaccatcgacgag

SEQ ID NO: 588 - DNA, 25 bp, Artificial Sequence
  Description of Artificial Sequence: Synthetic probe
gactgaagctgctggggccatgttt

SEQ ID NO: 589 - DNA, 25 bp, Artificial Sequence
  Description of Artificial Sequence: Synthetic probe
ctgctggggccatgtttttagaggc

SEQ ID NO: 590 - DNA, 25 bp, Artificial Sequence
  Description of Artificial Sequence: Synthetic probe
gctggggccatgtttttagaggcca

SEQ ID NO: 591 - DNA, 25 bp, Artificial Sequence
  Description of Artificial Sequence: Synthetic probe
tggggccatgtttttagaggccata

SEQ ID NO: 592 - DNA, 25 bp, Artificial Sequence
  Description of Artificial Sequence: Synthetic probe
ggccatgtttttagaggccataccc

SEQ ID NO: 593 - DNA, 25 bp, Artificial Sequence
  Description of Artificial Sequence: Synthetic probe
ccatgtttttagaggccatacccat

SEQ ID NO: 594 - DNA, 25 bp, Artificial Sequence
  Description of Artificial Sequence: Synthetic probe
tttttagaggccatacccatgtcta

SEQ ID NO: 595 - DNA, 25 bp, Artificial Sequence
  Description of Artificial Sequence: Synthetic probe
tttagaggccatacccatgtctatc

SEQ ID NO: 596 - DNA, 217 bp, Homo sapiens
gagcagctactacatgattggtgagcagaagttctccagcctccccctgggccgggaggcagtagaggctgctgtgaaagaggctggctacacaatcgaatggtttgaggtgatctcgcaaagttattcttccaccatggccaacaacgaaggacttttctccctggtggcgaggaagctgagcagacccctgtgatgcctgtgacctcaattaaag

SEQ ID NO: 597 - DNA, 25 bp, Artificial Sequence
  Description of Artificial Sequence: Synthetic probe
gagcagctactacatgattggtgag

SEQ ID NO: 598 - DNA, 25 bp, Artificial Sequence
  Description of Artificial Sequence: Synthetic probe
ctactacatgattggtgagcagaag

SEQ ID NO: 599 - DNA, 25 bp, Artificial Sequence
  Description of Artificial Sequence: Synthetic probe
ctacatgattggtgagcagaagttc

SEQ ID NO: 600 - DNA, 25 bp, Artificial Sequence
  Description of Artificial Sequence: Synthetic probe
gtgagcagaagttctccagcctccc

SEQ ID NO: 601 - DNA, 25 bp, Artificial Sequence
  Description of Artificial Sequence: Synthetic probe
gctgctgtgaaagaggctggctaca

SEQ ID NO: 602 - DNA, 25 bp, Artificial Sequence
  Description of Artificial Sequence: Synthetic probe
tggctacacaatcgaatggtttgag

SEQ ID NO: 603 - DNA, 25 bp, Artificial Sequence
  Description of Artificial Sequence: Synthetic probe
cacaatcgaatggtttgaggtgatc

SEQ ID NO: 604 - DNA, 25 bp, Artificial Sequence
  Description of Artificial Sequence: Synthetic probe
caatcgaatggtttgaggtgatctc

SEQ ID NO: 605 - DNA, 25 bp, Artificial Sequence
  Description of Artificial Sequence: Synthetic probe
aggtgatctcgcaaagttattcttc

SEQ ID NO: 606 - DNA, 25 bp, Artificial Sequence
  Description of Artificial Sequence: Synthetic probe
gcaaagttattcttccaccatggcc

SEQ ID NO: 607 - DNA, 25 bp, Artificial Sequence
  Description of Artificial Sequence: Synthetic probe
tccaccatggccaacaacgaaggac

SEQ ID NO: 608 - DNA, 25 bp, Artificial Sequence
  Description of Artificial Sequence: Synthetic probe
acttttctccctggtggcgaggaag

SEQ ID NO: 609 - DNA, 25 bp, Artificial Sequence
  Description of Artificial Sequence: Synthetic probe
tggcgaggaagctgagcagacccct

SEQ ID NO: 610 - DNA, 25 bp, Artificial Sequence
  Description of Artificial Sequence: Synthetic probe
gaagctgagcagacccctgtgatgc

SEQ ID NO: 611 - DNA, 25 bp, Artificial Sequence
  Description of Artificial Sequence: Synthetic probe
gagcagacccctgtgatgcctgtga

SEQ ID NO: 612 - DNA, 25 bp, Artificial Sequence
  Description of Artificial Sequence: Synthetic probe
gtgatgcctgtgacctcaattaaag

SEQ ID NO: 613 - DNA, 444 bp, Homo sapiens
  modified_base (36)..(36): a, c, g, t, unknown or other
  modified_base (55)..(55): a, c, g, t, unknown or other
  modified_base (59)..(59): a, c, g, t, unknown or other
  modified_base (67)..(67): a, c, g, t, unknown or other
  modified_base (78)..(78): a, c, g, t, unknown or other
  modified_base (117)..(117): a, c, g, t, unknown or other
  modified_base (137)..(137): a, c, g, t, unknown or other
  modified_base (318)..(318): a, c, g, t, unknown or other
  modified_base (331)..(350): a, c, g, t, unknown or other
cgcctaatgtgtttgagcatcacttaggagaagtcntctatttatttatttattnattnatttgttngttttagaagnttctatgttaatattttatgtgtaaaataaggttatgantgaatctacttgcacactcncccattatatttattgtttattttaggtcaaacccaagttagttcaatcctgattcatatttaatttgaagatagaaggtttgcagatattctctagtcatttgttaatatttcttcgtgatgacatatcacatgtcagccactgtgatagaggctgaggaatccaagaaaatggccagtnagatcaatgtgannnnnnnnnnnnnnnnnnnngtctattttgtaactgtaaagatgaatgtcagttgttatttattgaaatgatttcacagtgtgtggtcaacatttctcatgttgaagctttaag

SEQ ID NO: 614 - DNA, 25 bp, Artificial Sequence
  Description of Artificial Sequence: Synthetic probe
cgcctaatgtgtttgagcatcactt

SEQ ID NO: 615 - DNA, 25 bp, Artificial Sequence
  Description of Artificial Sequence: Synthetic probe
gtttgagcatcacttaggagaagtc

SEQ ID NO: 616 - DNA, 25 bp, Artificial Sequence
  Description of Artificial Sequence: Synthetic probe
taggtcaaacccaagttagttcaat

SEQ ID NO: 617 - DNA, 25 bp, Artificial Sequence
  Description of Artificial Sequence: Synthetic probe
ggtttgcagatattctctagtcatt

SEQ ID NO: 618 - DNA, 25 bp, Artificial Sequence
  Description of Artificial Sequence: Synthetic probe
tgcagatattctctagtcatttgtt

SEQ ID NO: 619 - DNA, 25 bp, Artificial Sequence
  Description of Artificial Sequence: Synthetic probe
gcagatattctctagtcatttgtta

SEQ ID NO: 620 - DNA, 25 bp, Artificial Sequence
  Description of Artificial Sequence: Synthetic probe
tttcttcgtgatgacatatcacatg

SEQ ID NO: 621 - DNA, 25 bp, Artificial Sequence
  Description of Artificial Sequence: Synthetic probe
ttcttcgtgatgacatatcacatgt

SEQ ID NO: 622 - DNA, 25 bp, Artificial Sequence
  Description of Artificial Sequence: Synthetic probe
cgtgatgacatatcacatgtcagcc

SEQ ID NO: 623 - DNA, 25 bp, Artificial Sequence
  Description of Artificial Sequence: Synthetic probe
tgacatatcacatgtcagccactgt

SEQ ID NO: 624 - DNA, 25 bp, Artificial Sequence
  Description of Artificial Sequence: Synthetic probe
acatatcacatgtcagccactgtga

SEQ ID NO: 625 - DNA, 25 bp, Artificial Sequence
  Description of Artificial Sequence: Synthetic probe
catatcacatgtcagccactgtgat

SEQ ID NO: 626 - DNA, 25 bp, Artificial Sequence
  Description of Artificial Sequence: Synthetic probe
ccactgtgatagaggctgaggaatc

SEQ ID NO: 627 - DNA, 25 bp, Artificial Sequence
  Description of Artificial Sequence: Synthetic probe
aatgatttcacagtgtgtggtcaac

SEQ ID NO: 628 - DNA, 25 bp, Artificial Sequence
  Description of Artificial Sequence: Synthetic probe
tgtgtggtcaacatttctcatgttg

SEQ ID NO: 629 - DNA, 25 bp, Artificial Sequence
  Description of Artificial Sequence: Synthetic probe
acatttctcatgttgaagctttaag

SEQ ID NO: 630 - DNA, 388 bp, Homo sapiens
  modified_base (49)..(64): a, c, g, t, unknown or other
  modified_base (169)..(183): a, c, g, t, unknown or other
cagtgtaaagctgccctggatgagcagtttgaacctcagaagactctgnnnnnnnnnnnnnnnntggctgaccagcaacaactgagagacacttttagaaaagttgtagaccactttggaagactggacattttggtcaataatgctggagtgaataataagaaaaacnnnnnnnnnnnnnnncaaattaatttggtttctgttatcagtggaacctatcttggtttggattacatgagtaagcaaaatggaggtgaaggcggcatcattatcaatatgtcatctttagcaggactcatgcccgttgcacagcagccggtttattgtgcttcaaagcatggcatagttggattcacacgctcagcagcgcccaccattgattgccaat

SEQ ID NO: 631 - DNA, 25 bp, Artificial Sequence
  Description of Artificial Sequence: Synthetic probe
cagtgtaaagctgccctggatgagc

SEQ ID NO: 632 - DNA, 25 bp, Artificial Sequence
  Description of Artificial Sequence: Synthetic probe
agtgtaaagctgccctggatgagca

SEQ ID NO: 633 - DNA, 25 bp, Artificial Sequence
  Description of Artificial Sequence: Synthetic probe
gtgtaaagctgccctggatgagcag

SEQ ID NO: 634 - DNA, 25 bp, Artificial Sequence
  Description of Artificial Sequence: Synthetic probe
tgtaaagctgccctggatgagcagt

SEQ ID NO: 635 - DNA, 25 bp, Artificial Sequence
  Description of Artificial Sequence: Synthetic probe
gagcagtttgaacctcagaagactc

SEQ ID NO: 636 - DNA, 25 bp, Artificial Sequence
  Description of Artificial Sequence: Synthetic probe
ggattcacacgctcagcagcgccca

SEQ ID NO: 637 - DNA, 25 bp, Artificial Sequence
  Description of Artificial Sequence: Synthetic probe
gattcacacgctcagcagcgcccac

SEQ ID NO: 638 - DNA, 25 bp, Artificial Sequence
  Description of Artificial Sequence: Synthetic probe
attcacacgctcagcagcgcccacc

SEQ ID NO: 639 - DNA, 25 bp, Artificial Sequence
  Description of Artificial Sequence: Synthetic probe
tcacacgctcagcagcgcccaccat

SEQ ID NO: 640 - DNA, 25 bp, Artificial Sequence
  Description of Artificial Sequence: Synthetic probe
cacacgctcagcagcgcccaccatt

SEQ ID NO: 641 - DNA, 25 bp, Artificial Sequence
  Description of Artificial Sequence: Synthetic probe
acacgctcagcagcgcccaccattg

SEQ ID NO: 642 - DNA, 25 bp, Artificial Sequence
  Description of Artificial Sequence: Synthetic probe
cacgctcagcagcgcccaccattga

SEQ ID NO: 643 - DNA, 25 bp, Artificial Sequence
  Description of Artificial Sequence: Synthetic probe
acgctcagcagcgcccaccattgat

SEQ ID NO: 644 - DNA, 25 bp, Artificial Sequence
  Description of Artificial Sequence: Synthetic probe
gctcagcagcgcccaccattgattg

SEQ ID NO: 645 - DNA, 25 bp, Artificial Sequence
  Description of Artificial Sequence: Synthetic probe
agcagcgcccaccattgattgccaa

SEQ ID NO: 646 - DNA, 25 bp, Artificial Sequence
  Description of Artificial Sequence: Synthetic probe
gcagcgcccaccattgattgccaat

SEQ ID NO: 647 - DNA, 477 bp, Homo sapiens
  modified_base (41)..(41): a, c, g, t, unknown or other
  modified_base (182)..(182): a, c, g, t, unknown or other
  modified_base (188)..(188): a, c, g, t, unknown or other
  modified_base (202)..(216): a, c, g, t, unknown or other
tttgtctcagctgtcgatggactcagcttccaggccttttncttacttaaacttcacaccagaaccttctgacattttctcctgcattgtgactcacgaaattgaccgctacacagcaattgcctattgggtaccccggaacgcactgccctcagatctgctggagaatgtgctgtgtggcngtggcntttggcctgggtgnnnnnnnnnnnnnnntgggcattgttctcatcatctacttccggaagccttgctcaggtgactgattcttccagaccagagtttgatgccagcagcttcggccatccaaacagaggatgctcagatttctcacatcctgcccaggatctcctcttagggtagaagaagtctctgggacatccctggggtgtgtgtgtagatttcccacctggggactctgctgtccctgggcttgcatcccagggatcccagagtggcctgcctatcacaaccaca

SEQ ID NO: 648 - DNA, 25 bp, Artificial Sequence
  Description of Artificial Sequence: Synthetic probe
tttgtctcagctgtcgatggactca

SEQ ID NO: 649 - DNA, 25 bp, Artificial Sequence
  Description of Artificial Sequence: Synthetic probe
gtcgatggactcagcttccaggcct

SEQ ID NO: 650 - DNA, 25 bp, Artificial Sequence
  Description of Artificial Sequence: Synthetic probe
gatggactcagcttccaggcctttt

SEQ ID NO: 651 - DNA, 25 bp, Artificial Sequence
  Description of Artificial Sequence: Synthetic probe
ttctgacattttctcctgcattgtg

SEQ ID NO: 652 - DNA, 25 bp, Artificial Sequence
  Description of Artificial Sequence: Synthetic probe
tctgacattttctcctgcattgtga

SEQ ID NO: 653 - DNA, 25 bp, Artificial Sequence
  Description of Artificial Sequence: Synthetic probe
attttctcctgcattgtgactcacg

SEQ ID NO: 654 - DNA, 25 bp, Artificial Sequence
  Description of Artificial Sequence: Synthetic probe
tcctgcattgtgactcacgaaattg

SEQ ID NO: 655 - DNA, 25 bp, Artificial Sequence
  Description of Artificial Sequence: Synthetic probe
gaaattgaccgctacacagcaattg

SEQ ID NO: 656 - DNA, 25 bp, Artificial Sequence
  Description of Artificial Sequence: Synthetic probe
tcagatctgctggagaatgtgctgt

SEQ ID NO: 657 - DNA, 25 bp, Artificial Sequence
  Description of Artificial Sequence: Synthetic probe
tgttctcatcatctacttccggaag

SEQ ID NO: 658 - DNA, 25 bp, Artificial Sequence
  Description of Artificial Sequence: Synthetic probe
gttctcatcatctacttccggaagc

SEQ ID NO: 659 - DNA, 25 bp, Artificial Sequence
  Description of Artificial Sequence: Synthetic probe
ccttgctcaggtgactgattcttcc

SEQ ID NO: 660 - DNA, 25 bp, Artificial Sequence
  Description of Artificial Sequence: Synthetic probe
gactgattcttccagaccagagttt

SEQ ID NO: 661 - DNA, 25 bp, Artificial Sequence
  Description of Artificial Sequence: Synthetic probe
tgcatcccagggatcccagagtggc

SEQ ID NO: 662 - DNA, 25 bp, Artificial Sequence
  Description of Artificial Sequence: Synthetic probe
ccagggatcccagagtggcctgcct

SEQ ID NO: 663 - DNA, 25 bp, Artificial Sequence
  Description of Artificial Sequence: Synthetic probe
gagtggcctgcctatcacaaccaca

SEQ ID NO: 664 - DNA, 437 bp, Homo sapiens
  modified_base (48)..(50): a, c, g, t, unknown or other
  modified_base (53)..(53): a, c, g, t, unknown or other
  modified_base (93)..(93): a, c, g, t, unknown or other
  modified_base (352)..(352): a, c, g, t, unknown or other
tccttaaagaactggctgatggggcaggaggtccaggcctgggctctnnnggncctcctagagggccattggagcttgcagctcagacccccnactttgagttttatttatttaaatagtagttggatgcttggcacgtcgtcctgtaataggaaacccttgcctcatcagttttcctgatttacaagtgcaatattttagccaatgccttgggagaagctgccatgcaaaggtggacaccattctccagcttcaggggatatgctcgtcccgggcaccggtggcaggcagctggccttctggactaaggcagcctggggggacactgcagtctggctacacacagagatcntggcaccccctgggtggagtgtccctcgggggctttgggaaagcatggcaccctcagaccacacagtagccaagttctggagcaa

SEQ ID NO: 665 - DNA, 25 bp, Artificial Sequence
  Description of Artificial Sequence: Synthetic probe
tccttaaagaactggctgatggggc

SEQ ID NO: 666 - DNA, 25 bp, Artificial Sequence
  Description of Artificial Sequence: Synthetic probe
tcctagagggccattggagcttgca

SEQ ID NO: 667 - DNA, 25 bp, Artificial Sequence
  Description of Artificial Sequence: Synthetic probe
cctagagggccattggagcttgcag

SEQ ID NO: 668 - DNA, 25 bp, Artificial Sequence
  Description of Artificial Sequence: Synthetic probe
attggagcttgcagctcagaccccc

SEQ ID NO: 669 - DNA, 25 bp, Artificial Sequence
  Description of Artificial Sequence: Synthetic probe
agtagttggatgcttggcacgtcgt

SEQ ID NO: 670 - DNA, 25 bp, Artificial Sequence
  Description of Artificial Sequence: Synthetic probe
tggatgcttggcacgtcgtcctgta

SEQ ID NO: 671 - DNA, 25 bp, Artificial Sequence
  Description of Artificial Sequence: Synthetic probe
tcctgtaataggaaacccttgcctc

SEQ ID NO: 672 - DNA, 25 bp, Artificial Sequence
  Description of Artificial Sequence: Synthetic probe
ccttgggagaagctgccatgcaaag

SEQ ID NO: 673 - DNA, 25 bp, Artificial Sequence
  Description of Artificial Sequence: Synthetic probe
gagaagctgccatgcaaaggtggac

SEQ ID NO: 674 - DNA, 25 bp, Artificial Sequence
  Description of Artificial Sequence: Synthetic probe
ctgccatgcaaaggtggacaccatt

SEQ ID NO: 675 - DNA, 25 bp, Artificial Sequence
  Description of Artificial Sequence: Synthetic probe
gcttcaggggatatgctcgtcccgg

SEQ ID NO: 676 - DNA, 25 bp, Artificial Sequence
  Description of Artificial Sequence: Synthetic probe
ctggccttctggactaaggcagcct

SEQ ID NO: 677 - DNA, 25 bp, Artificial Sequence
  Description of Artificial Sequence: Synthetic probe
ggacactgcagtctggctacacaca

SEQ ID NO: 678 - DNA, 25 bp, Artificial Sequence
  Description of Artificial Sequence: Synthetic probe
gacactgcagtctggctacacacag

SEQ ID NO: 679 - DNA, 25 bp, Artificial Sequence
  Description of Artificial Sequence: Synthetic probe
tccctcgggggctttgggaaagcat

SEQ ID NO: 680 - DNA, 25 bp, Artificial Sequence
  Description of Artificial Sequence: Synthetic probe
acacagtagccaagttctggagcaa

SEQ ID NO: 681 - DNA, 462 bp, Homo sapiens
  modified_base (28)..(28): a, c, g, t, unknown or other
  modified_base (35)..(36): a, c, g, t, unknown or other
  modified_base (39)..(39): a, c, g, t, unknown or other
  modified_base (83)..(83): a, c, g, t, unknown or other
  modified_base (112)..(112): a, c, g, t, unknown or other
  modified_base (116)..(116): a, c, g, t, unknown or other
  modified_base (120)..(120): a, c, g, t, unknown or other
  modified_base (167)..(167): a, c, g, t, unknown or other
  modified_base (303)..(303): a, c, g, t, unknown or other
  modified_base (382)..(382): a, c, g, t, unknown or other
  modified_base (392)..(392): a, c, g, t, unknown or other
agtacaagtgcaaggtctccaacaaagncctcccnnccnccatcgagaaaaccatctccaaagccaaagggcagccccgaganccacaggtgtacaccctgcccccatcccnggangagntgaccaagaaccaggtcagcctgacctgcctggtcaaaggcttctancccagcgacatcgccgtggagtgggagagcaatgggcagccggagaacaactacaagaccacgcctcccgtgctggactccgacggctccttcttcctctacagcaagctcaccgtggacaagagcaggtggcagnaggggaacgtcttctcatgctccgtgatgcatgaggctctgcacaaccactacacgcagaagagcctctccctgtctcngggtaaatgnagtgcgacggccggcaagcccccgctccccgggctctcgcggtcgcacgaggatgcttggcacgtacccc

SEQ ID NO: 682 - DNA, 25 bp, Artificial Sequence
  Description of Artificial Sequence: Synthetic probe
agtacaagtgcaaggtctccaacaa

SEQ ID NO: 683 - DNA, 25 bp, Artificial Sequence
  Description of Artificial Sequence: Synthetic probe
tacaagtgcaaggtctccaacaaag

SEQ ID NO: 684 - DNA, 25 bp, Artificial Sequence
  Description of Artificial Sequence: Synthetic probe
tgaccaagaaccaggtcagcctgac

SEQ ID NO: 685 - DNA, 25 bp, Artificial Sequence
  Description of Artificial Sequence: Synthetic probe
gtcagcctgacctgcctggtcaaag

SEQ ID NO: 686 - DNA, 25 bp, Artificial Sequence
  Description of Artificial Sequence: Synthetic probe
tgacctgcctggtcaaaggcttcta

SEQ ID NO: 687 - DNA, 25 bp, Artificial Sequence
  Description of Artificial Sequence: Synthetic probe
agagcaatgggcagccggagaacaa

SEQ ID NO: 688 - DNA, 25 bp, Artificial Sequence
  Description of Artificial Sequence: Synthetic probe
cagccggagaacaactacaagacca

SEQ ID NO: 689 - DNA, 25 bp, Artificial Sequence
  Description of Artificial Sequence: Synthetic probe
tgctggactccgacggctccttctt

SEQ ID NO: 690 - DNA, 25 bp, Artificial Sequence
  Description of Artificial Sequence: Synthetic probe
ctcaccgtggacaagagcaggtggc

SEQ ID NO: 691 - DNA, 25 bp, Artificial Sequence
  Description of Artificial Sequence: Synthetic probe
tcatgctccgtgatgcatgaggctc

SEQ ID NO: 692 - DNA, 25 bp, Artificial Sequence
  Description of Artificial Sequence: Synthetic probe
catgctccgtgatgcatgaggctct

SEQ ID NO: 693 - DNA, 25 bp, Artificial Sequence
  Description of Artificial Sequence: Synthetic probe
tccgtgatgcatgaggctctgcaca

SEQ ID NO: 694 - DNA, 25 bp, Artificial Sequence
  Description of Artificial Sequence: Synthetic probe
ccgtgatgcatgaggctctgcacaa

SEQ ID NO: 695 - DNA, 25 bp, Artificial Sequence
  Description of Artificial Sequence: Synthetic probe
tctgcacaaccactacacgcagaag

SEQ ID NO: 696 - DNA, 25 bp, Artificial Sequence
  Description of Artificial Sequence: Synthetic probe
tctcgcggtcgcacgaggatgcttg

SEQ ID NO: 697 - DNA, 25 bp, Artificial Sequence
  Description of Artificial Sequence: Synthetic probe
cacgaggatgcttggcacgtacccc

SEQ ID NO: 698 - DNA, 565 bp, Homo sapiens
  modified_base (252)..(252): a, c, g, t, unknown or other
  modified_base (297)..(297): a, c, g, t, unknown or other
  modified_base (301)..(301): a, c, g, t, unknown or other
aacaccactactgagtgccgcttgggccactgtcctgatcctgtgctggtgaatggagagttcagttcttcagggcctgtgaatgtaagtgacaaaatcacgtttatgtgcaatgaccactacatcctcaagggcagcaatcggagccagtgtctagaggaccacacctgggcacctccctttcccatctgcaaaagtagggactgtgaccctcctgggaatccagttcatggctattttgaaggaaataanttcaccttaggatccaccattagttattactgtgaagacaggtanctancttagtgggcgtgcaggagcagcaatgcgttgatggggagtggagcagtgcacttccagtctgcaagttgatccaggaagctcccaaaccagagtgtgagaaggcacttcttgcctttcaggagagtaagaacctctgcgaagccatggagaactttatgcaacaattaaaggaaagtggcatgacaatggaggagctaaaatattctctggagctgaagaaagctgagttgaaggcaaaattgttgtaacactacagctgagc

SEQ ID NO: 699 - DNA, 25 bp, Artificial Sequence
  Description of Artificial Sequence: Synthetic probe
aacaccactactgagtgccgcttgg

SEQ ID NO: 700 - DNA, 25 bp, Artificial Sequence
  Description of Artificial Sequence: Synthetic probe
cgcttgggccactgtcctgatcctg

SEQ ID NO: 701 - DNA, 25 bp, Artificial Sequence
  Description of Artificial Sequence: Synthetic probe
ctgatcctgtgctggtgaatggaga

SEQ ID NO: 702 - DNA, 25 bp, Artificial Sequence
  Description of Artificial Sequence: Synthetic probe
cgtttatgtgcaatgaccactacat

SEQ ID NO: 703 - DNA, 25 bp, Artificial Sequence
  Description of Artificial Sequence: Synthetic probe
ccactacatcctcaagggcagcaat

SEQ ID NO: 704 - DNA, 25 bp, Artificial Sequence
  Description of Artificial Sequence: Synthetic probe
ggcagcaatcggagccagtgtctag

SEQ ID NO: 705 - DNA, 25 bp, Artificial Sequence
  Description of Artificial Sequence: Synthetic probe
tcccatctgcaaaagtagggactgt

SEQ ID NO: 706 - DNA, 25 bp, Artificial Sequence
  Description of Artificial Sequence: Synthetic probe
ccatctgcaaaagtagggactgtga

SEQ ID NO: 707 - DNA, 25 bp, Artificial Sequence
  Description of Artificial Sequence: Synthetic probe
tcctgggaatccagttcatggctat

SEQ ID NO: 708 - DNA, 25 bp, Artificial Sequence
  Description of Artificial Sequence: Synthetic probe
ctgggaatccagttcatggctattt

SEQ ID NO: 709 - DNA, 25 bp, Artificial Sequence
  Description of Artificial Sequence: Synthetic probe
agtgcacttccagtctgcaagttga

SEQ ID NO: 710 - DNA, 25 bp, Artificial Sequence
  Description of Artificial Sequence: Synthetic probe
tcccaaaccagagtgtgagaaggca

SEQ ID NO: 711 - DNA, 25 bp, Artificial Sequence
  Description of Artificial Sequence: Synthetic probe
gcacttcttgcctttcaggagagta

SEQ ID NO: 712 - DNA, 25 bp, Artificial Sequence
  Description of Artificial Sequence: Synthetic probe
ctgcgaagccatggagaactttatg

SEQ ID NO: 713 - DNA, 25 bp, Artificial Sequence
  Description of Artificial Sequence: Synthetic probe
tctctggagctgaagaaagctgagt

SEQ ID NO: 714 - DNA, 25 bp, Artificial Sequence
  Description of Artificial Sequence: Synthetic probe
aattgttgtaacactacagctgagc

SEQ ID NO: 715 - DNA, 281 bp, Homo sapiens
  modified_base (77)..(130): a, c, g, t, unknown or other
  modified_base (169)..(187): a, c, g, t, unknown or other
  modified_base (255)..(255): a, c, g, t, unknown or other
ttctcagtgccttggccctgttgagtctatctggtaacactggagctgactccctgggaagagaggccaaatgttannnnnnnnnnnnnnnnnnnnnnnnnnnnnnnnnnnnnnnnnnnnnnnnnnnnnnaaatacttatcccaatgaatgcgtgttatgttttgaaannnnnnnnnnnnnnnnnnntatcctcattcaaaaatctgggccttgctgagaaccaaggttttgaaatcccatcaggtcaccgcgangcctgactggccttattgttgaataa

SEQ ID NO: 716 - DNA, 25 bp, Artificial Sequence
  Description of Artificial Sequence: Synthetic probe
ttctcagtgccttggccctgttgag

SEQ ID NO: 717 - DNA, 25 bp, Artificial Sequence
  Description of Artificial Sequence: Synthetic probe
gtgccttggccctgttgagtctatc

SEQ ID NO: 718 - DNA, 25 bp, Artificial Sequence
  Description of Artificial Sequence: Synthetic probe
tctggtaacactggagctgactccc

SEQ ID NO: 719 - DNA, 25 bp, Artificial Sequence
  Description of Artificial Sequence: Synthetic probe
actggagctgactccctgggaagag

SEQ ID NO: 720 - DNA, 25 bp, Artificial Sequence
  Description of Artificial Sequence: Synthetic probe
tgactccctgggaagagaggccaaa

SEQ ID NO: 721 - DNA, 25 bp, Artificial Sequence
  Description of Artificial Sequence: Synthetic probe
ctccctgggaagagaggccaaatgt

SEQ ID NO: 722 - DNA, 25 bp, Artificial Sequence
  Description of Artificial Sequence: Synthetic probe
aatacttatcccaatgaatgcgtgt

SEQ ID NO: 723 - DNA, 25 bp, Artificial Sequence
  Description of Artificial Sequence: Synthetic probe
tatcccaatgaatgcgtgttatgtt

SEQ ID NO: 724 - DNA, 25 bp, Artificial Sequence
  Description of Artificial Sequence: Synthetic probe
tcctcattcaaaaatctgggccttg

SEQ ID NO: 725 - DNA, 25 bp, Artificial Sequence
  Description of Artificial Sequence: Synthetic probe
cattcaaaaatctgggccttgctga

SEQ ID NO: 726 - DNA, 25 bp, Artificial Sequence
  Description of Artificial Sequence: Synthetic probe
aatctgggccttgctgagaaccaag

SEQ ID NO: 727 - DNA, 25 bp, Artificial Sequence
  Description of Artificial Sequence: Synthetic probe
tgctgagaaccaaggttttgaaatc

SEQ ID NO: 728 - DNA, 25 bp, Artificial Sequence
  Description of Artificial Sequence: Synthetic probe
ttttgaaatcccatcaggtcaccgc

SEQ ID NO: 729 - DNA, 25 bp, Artificial Sequence
  Description of Artificial Sequence: Synthetic probe
ttgaaatcccatcaggtcaccgcga

SEQ ID NO: 730 - DNA, 25 bp, Artificial Sequence
  Description of Artificial Sequence: Synthetic probe
gcctgactggccttattgttgaata

SEQ ID NO: 731 - DNA, 25 bp, Artificial Sequence
  Description of Artificial Sequence: Synthetic probe
cctgactggccttattgttgaataa

SEQ ID NO: 732 - DNA, 188 bp, Homo sapiens
atgtgccttgtgaagacaagttctcctttgtctgcaagttcaaaaactagaggcagctggaaaatacatgtctagaactgatccagcaattacaacggagtcaaaaattaaaccggaccatctctccaactcaactcaacctggacactctcttctctgctgagtttgccttgttaatcttcaatagt

SEQ ID NO: 733 - DNA, 25 bp, Artificial Sequence
  Description of Artificial Sequence: Synthetic probe
atgtgccttgtgaagacaagttctc

SEQ ID NO: 734 - DNA, 25 bp, Artificial Sequence
  Description of Artificial Sequence: Synthetic probe
tgtgccttgtgaagacaagttctcc

SEQ ID NO: 735 - DNA, 25 bp, Artificial Sequence
  Description of Artificial Sequence: Synthetic probe
aatacatgtctagaactgatccagc

SEQ ID NO: 736 - DNA, 25 bp, Artificial Sequence
  Description of Artificial Sequence: Synthetic probe
agaactgatccagcaattacaacgg

SEQ ID NO: 737 - DNA, 25 bp, Artificial Sequence
  Description of Artificial Sequence: Synthetic probe
ctgatccagcaattacaacggagtc

SEQ ID NO: 738 - DNA, 25 bp, Artificial Sequence
  Description of Artificial Sequence: Synthetic probe
gatccagcaattacaacggagtcaa

SEQ ID NO: 739 - DNA, 25 bp, Artificial Sequence
  Description of Artificial Sequence: Synthetic probe
ccagcaattacaacggagtcaaaaa

SEQ ID NO: 740 - DNA, 25 bp, Artificial Sequence
  Description of Artificial Sequence: Synthetic probe
aacctggacactctcttctctgctg

SEQ ID NO: 741 - DNA, 25 bp, Artificial Sequence
  Description of Artificial Sequence: Synthetic probe
cctggacactctcttctctgctgag

SEQ ID NO: 742 - DNA, 25 bp, Artificial Sequence
  Description of Artificial Sequence: Synthetic probe
ggacactctcttctctgctgagttt

SEQ ID NO: 743 - DNA, 25 bp, Artificial Sequence
  Description of Artificial Sequence: Synthetic probe
tctcttctctgctgagtttgccttg

SEQ ID NO: 744 - DNA, 25 bp, Artificial Sequence
  Description of Artificial Sequence: Synthetic probe
cttctctgctgagtttgccttgtta

SEQ ID NO: 745 - DNA, 25 bp, Artificial Sequence
  Description of Artificial Sequence: Synthetic probe
tctctgctgagtttgccttgttaat

SEQ ID NO: 746 - DNA, 25 bp, Artificial Sequence
  Description of Artificial Sequence: Synthetic probe
ctctgctgagtttgccttgttaatc

SEQ ID NO: 747 - DNA, 25 bp, Artificial Sequence
  Description of Artificial Sequence: Synthetic probe
tgagtttgccttgttaatcttcaat

SEQ ID NO: 748 - DNA, 25 bp, Artificial Sequence
  Description of Artificial Sequence: Synthetic probe
gtttgccttgttaatcttcaatagt

SEQ ID NO: 749 - DNA, 133 bp, Homo sapiens
gtctgtgttctggttgcgctggccattgtctatctcattgccttggctgtctgtcagtgccgccgaaagaactacgggcagctggacatctttccagcccgggatacctaccatcctatgagcgagtacccca

SEQ ID NO: 750 - DNA, 25 bp, Artificial Sequence
  Description of Artificial Sequence: Synthetic probe
gtctgtgttctggttgcgctggcca

SEQ ID NO: 751 - DNA, 25 bp, Artificial Sequence
  Description of Artificial Sequence: Synthetic probe
ctgtgttctggttgcgctggccatt

SEQ ID NO: 752 - DNA, 25 bp, Artificial Sequence
  Description of Artificial Sequence: Synthetic probe
ttctggttgcgctggccattgtcta

SEQ ID NO: 753 - DNA, 25 bp, Artificial Sequence
  Description of Artificial Sequence: Synthetic probe
gcgctggccattgtctatctcattg

SEQ ID NO: 754 - DNA, 25 bp, Artificial Sequence
  Description of Artificial Sequence: Synthetic probe
gccattgtctatctcattgccttgg

SEQ ID NO: 755 - DNA, 25 bp, Artificial Sequence
  Description of Artificial Sequence: Synthetic probe
ggctgtctgtcagtgccgccgaaag

SEQ ID NO: 756 - DNA, 25 bp, Artificial Sequence
  Description of Artificial Sequence: Synthetic probe
gctgtctgtcagtgccgccgaaaga

SEQ ID NO: 757 - DNA, 25 bp, Artificial Sequence
  Description of Artificial Sequence: Synthetic probe
tcagtgccgccgaaagaactacggg

SEQ ID NO: 758 - DNA, 25 bp, Artificial Sequence
  Description of Artificial Sequence: Synthetic probe
ccgccgaaagaactacgggcagctg

SEQ ID NO: 759 - DNA, 25 bp, Artificial Sequence
  Description of Artificial Sequence: Synthetic probe
gaactacgggcagctggacatcttt

SEQ ID NO: 760 - DNA, 25 bp, Artificial Sequence
  Description of Artificial Sequence: Synthetic probe
cgggcagctggacatctttccagcc

SEQ ID NO: 761 - DNA, 25 bp, Artificial Sequence
  Description of Artificial Sequence: Synthetic probe
ggacatctttccagcccgggatacc

SEQ ID NO: 762 - DNA, 25 bp, Artificial Sequence
  Description of Artificial Sequence: Synthetic probe
agcccgggatacctaccatcctatg

SEQ ID NO: 763 - DNA, 25 bp, Artificial Sequence
  Description of Artificial Sequence: Synthetic probe
gcccgggatacctaccatcctatga

SEQ ID NO: 764 - DNA, 25 bp, Artificial Sequence
  Description of Artificial Sequence: Synthetic probe
acctaccatcctatgagcgagtacc

SEQ ID NO: 765 - DNA, 25 bp, Artificial Sequence
  Description of Artificial Sequence: Synthetic probe
taccatcctatgagcgagtacccca

SEQ ID NO: 766 - DNA, 235 bp, Homo sapiens
agacttacagggtgcgaacattccagataggtacaggggagaaactggtgaaggccctggttccagcctttctgggtagaaccatctcctcctatgccacctgtttgggcccctcctgggactttatcaccgtgccagacttcatggaggaactgtttaccagaatgttagatgtgacagcctcatggcctcctctaggtatggtggcatcttcccaggttctgggactaggatg

SEQ ID NO: 767 - DNA, 25 bp, Artificial Sequence
  Description of Artificial Sequence: Synthetic probe
agacttacagggtgcgaacattcca

SEQ ID NO: 768 - DNA, 25 bp, Artificial Sequence
  Description of Artificial Sequence: Synthetic probe
ttacagggtgcgaacattccagata

SEQ ID NO: 769 - DNA, 25 bp, Artificial Sequence
  Description of Artificial Sequence: Synthetic probe
tccagataggtacaggggagaaact

SEQ ID NO: 770 - DNA, 25 bp, Artificial Sequence
  Description of Artificial Sequence: Synthetic probe
tggtgaaggccctggttccagcctt

SEQ ID NO: 771 - DNA, 25 bp, Artificial Sequence
  Description of Artificial Sequence: Synthetic probe
ggtgaaggccctggttccagccttt

SEQ ID NO: 772 - DNA, 25 bp, Artificial Sequence
  Description of Artificial Sequence: Synthetic probe
ggtagaaccatctcctcctatgcca

SEQ ID NO: 773 - DNA, 25 bp, Artificial Sequence
  Description of Artificial Sequence: Synthetic probe
ctcctgggactttatcaccgtgcca

SEQ ID NO: 774 - DNA, 25 bp, Artificial Sequence
  Description of Artificial Sequence: Synthetic probe
tgggactttatcaccgtgccagact

SEQ ID NO: 775 - DNA, 25 bp, Artificial Sequence
  Description of Artificial Sequence: Synthetic probe
tatcaccgtgccagacttcatggag

SEQ ID NO: 776 - DNA, 25 bp, Artificial Sequence
  Description of Artificial Sequence: Synthetic probe
cttcatggaggaactgtttaccaga

SEQ ID NO: 777 - DNA, 25 bp, Artificial Sequence
  Description of Artificial Sequence: Synthetic probe
ttaccagaatgttagatgtgacagc

SEQ ID NO: 778 - DNA, 25 bp, Artificial Sequence
  Description of Artificial Sequence: Synthetic probe
tgttagatgtgacagcctcatggcc

SEQ ID NO: 779 - DNA, 25 bp, Artificial Sequence
  Description of Artificial Sequence: Synthetic probe
gtgacagcctcatggcctcctctag

SEQ ID NO: 780 - DNA, 25 bp, Artificial Sequence
  Description of Artificial Sequence: Synthetic probe
agcctcatggcctcctctaggtatg

SEQ ID NO: 781 - DNA, 25 bp, Artificial Sequence
  Description of Artificial Sequence: Synthetic probe
gtatggtggcatcttcccaggttct

SEQ ID NO: 782 - DNA, 25 bp, Artificial Sequence
  Description of Artificial Sequence: Synthetic probe
cttcccaggttctgggactaggatg

SEQ ID NO: 783 - DNA, 165 bp, Homo sapiens
  modified_base (86)..(100): a, c, g, t, unknown or other
gcctgggctatttccccagtagcattgtccgagaggaccagaccctgaaacctggcaaagtcgatgtgaagacagacaaatgggannnnnnnnnnnnnnnagctcagcctaccgctggccctgccgtttcccctccttgggtttatgcaaatacaatcagcccag

SEQ ID NO: 784 - DNA, 25 bp, Artificial Sequence
  Description of Artificial Sequence: Synthetic probe
gcctgggctatttccccagtagcat

SEQ ID NO: 785 - DNA, 25 bp, Artificial Sequence
  Description of Artificial Sequence: Synthetic probe
ggctatttccccagtagcattgtcc

SEQ ID NO: 786 - DNA, 25 bp, Artificial Sequence
  Description of Artificial Sequence: Synthetic probe
tttccccagtagcattgtccgagag

SEQ ID NO: 787 - DNA, 25 bp, Artificial Sequence
  Description of Artificial Sequence: Synthetic probe
tccccagtagcattgtccgagagga

SEQ ID NO: 788 - DNA, 25 bp, Artificial Sequence
  Description of Artificial Sequence: Synthetic probe
tagcattgtccgagaggaccagacc

SEQ ID NO: 789 - DNA, 25 bp, Artificial Sequence
  Description of Artificial Sequence: Synthetic probe
tccgagaggaccagaccctgaaacc

SEQ ID NO: 790 - DNA, 25 bp, Artificial Sequence
  Description of Artificial Sequence: Synthetic probe
cgagaggaccagaccctgaaacctg

SEQ ID NO: 791 - DNA, 25 bp, Artificial Sequence
  Description of Artificial Sequence: Synthetic probe
aggaccagaccctgaaacctggcaa

SEQ ID NO: 792 - DNA, 25 bp, Artificial Sequence
  Description of Artificial Sequence: Synthetic probe
ccagaccctgaaacctggcaaagtc

SEQ ID NO: 793 - DNA, 25 bp, Artificial Sequence
  Description of Artificial Sequence: Synthetic probe
ctgaaacctggcaaagtcgatgtga

SEQ ID NO: 794 - DNA, 25 bp, Artificial Sequence
  Description of Artificial Sequence: Synthetic probe
gaaacctggcaaagtcgatgtgaag

SEQ ID NO: 795 - DNA, 25 bp, Artificial Sequence
  Description of Artificial Sequence: Synthetic probe
cctggcaaagtcgatgtgaagacag

SEQ ID NO: 796 - DNA, 25 bp, Artificial Sequence
  Description of Artificial Sequence: Synthetic probe
ccctccttgggtttatgcaaataca

SEQ ID NO: 797 - DNA, 25 bp, Artificial Sequence
  Description of Artificial Sequence: Synthetic probe
ctccttgggtttatgcaaatacaat

SEQ ID NO: 798 - DNA, 25 bp, Artificial Sequence
  Description of Artificial Sequence: Synthetic probe
tccttgggtttatgcaaatacaatc

SEQ ID NO: 799 - DNA, 25 bp, Artificial Sequence
  Description of Artificial Sequence: Synthetic probe
gtttatgcaaatacaatcagcccag

SEQ ID NO: 800 - DNA, 267 bp, Homo sapiens
  modified_base (37)..(37): a, c, g, t, unknown or other
  modified_base (39)..(59): a, c, g, t, unknown or other
gtaaggcattttcatctttccttcgggttggcaaaantnnnnnnnnnnnnnnnnnnnnnggtgaaccaggggtgttgatggtgataagggaggaatatagaatgaaagactgaatcttcctttgttgcacaaatagagtttggaaaaagcctgtgaaaggtgtcttctttgacttaatgtctttaaaagtatccagagatactacaatattaacataagaaaagattatatattatttctgaatcgagatgtccatagtcaaatttg

SEQ ID NO: 801 - DNA, 25 bp, Artificial Sequence
  Description of Artificial Sequence: Synthetic probe
gtaaggcattttcatctttccttcg

SEQ ID NO: 802 - DNA, 25 bp, Artificial Sequence
  Description of Artificial Sequence: Synthetic probe
tttcatctttccttcgggttggcaa

SEQ ID NO: 803 - DNA, 25 bp, Artificial Sequence
  Description of Artificial Sequence: Synthetic probe
ttcatctttccttcgggttggcaaa

SEQ ID NO: 804 - DNA, 25 bp, Artificial Sequence
  Description of Artificial Sequence: Synthetic probe
tgaaagactgaatcttcctttgttg

SEQ ID NO: 805 - DNA, 25 bp, Artificial Sequence
  Description of Artificial Sequence: Synthetic probe
gaaagactgaatcttcctttgttgc

SEQ ID NO: 806 - DNA, 25 bp, Artificial Sequence
  Description of Artificial Sequence: Synthetic probe
tcctttgttgcacaaatagagtttg

SEQ ID NO: 807 - DNA, 25 bp, Artificial Sequence
  Description of Artificial Sequence: Synthetic probe
cctttgttgcacaaatagagtttgg

SEQ ID NO: 808 - DNA, 25 bp, Artificial Sequence
  Description of Artificial Sequence: Synthetic probe
aaagcctgtgaaaggtgtcttcttt

SEQ ID NO: 809 - DNA, 25 bp, Artificial Sequence
  Description of Artificial Sequence: Synthetic probe
agcctgtgaaaggtgtcttctttga

SEQ ID NO: 810 - DNA, 25 bp, Artificial Sequence
  Description of Artificial Sequence: Synthetic probe
aaggtgtcttctttgacttaatgtc

SEQ ID NO: 811 - DNA, 25 bp, Artificial Sequence
  Description of Artificial Sequence: Synthetic probe
aggtgtcttctttgacttaatgtct

SEQ ID NO: 812 - DNA, 25 bp, Artificial Sequence
  Description of Artificial Sequence: Synthetic probe
tgtctttaaaagtatccagagatac

SEQ ID NO: 813 - DNA, 25 bp, Artificial Sequence
  Description of Artificial Sequence: Synthetic probe
tattatttctgaatcgagatgtcca

SEQ ID NO: 814 - DNA, 25 bp, Artificial Sequence
  Description of Artificial Sequence: Synthetic probe
attatttctgaatcgagatgtccat

SEQ ID NO: 815 - DNA, 25 bp, Artificial Sequence
  Description of Artificial Sequence: Synthetic probe
ttctgaatcgagatgtccatagtca

SEQ ID NO: 816 - DNA, 25 bp, Artificial Sequence
  Description of Artificial Sequence: Synthetic probe
atcgagatgtccatagtcaaatttg

SEQ ID NO: 817 - DNA, 163 bp, Homo sapiens
  modified_base (26)..(35): a, c, g, t, unknown or other
  modified_base (37)..(42): a, c, g, t, unknown or other
  modified_base (48)..(48): a, c, g, t, unknown or other
  modified_base (53)..(53): a, c, g, t, unknown or other
  modified_base (56)..(59): a, c, g, t, unknown or other
  modified_base (68)..(68): a, c, g, t, unknown or other
  modified_base (81)..(81): a, c, g, t, unknown or other
ttgttgttcttagacaagtgcctccnnnnnnnnnncnnnnnncttctncctgnttnnnnaagcaaatnccacaggccaccntatagctacatactcctggcattgcactttttaaccttgctgacatccaaatagaagataggactatctaagccctaggttt

SEQ ID NO: 818 - DNA, 25 bp, Artificial Sequence
  Description of Artificial Sequence: Synthetic probe
ttgttgttcttagacaagtgcctcc

SEQ ID NO: 819 - DNA, 25 bp, Artificial Sequence
  Description of Artificial Sequence: Synthetic probe
tatagctacatactcctggcattgc

SEQ ID NO: 820 - DNA, 25 bp, Artificial Sequence
  Description of Artificial Sequence: Synthetic probe
atagctacatactcctggcattgca

SEQ ID NO: 821 - DNA, 25 bp, Artificial Sequence
  Description of Artificial Sequence: Synthetic probe
tagctacatactcctggcattgcac

SEQ ID NO: 822 - DNA, 25 bp, Artificial Sequence
  Description of Artificial Sequence: Synthetic probe
gctacatactcctggcattgcactt

SEQ ID NO: 823 - DNA, 25 bp, Artificial Sequence
  Description of Artificial Sequence: Synthetic probe
cctggcattgcactttttaaccttg

SEQ ID NO: 824 - DNA, 25 bp, Artificial Sequence
  Description of Artificial Sequence: Synthetic probe
ctggcattgcactttttaaccttgc

SEQ ID NO: 825 - DNA, 25 bp, Artificial Sequence
  Description of Artificial Sequence: Synthetic probe
tggcattgcactttttaaccttgct

SEQ ID NO: 826 - DNA, 25 bp, Artificial Sequence
  Description of Artificial Sequence: Synthetic probe
gcattgcactttttaaccttgctga

SEQ ID NO: 827 - DNA, 25 bp, Artificial Sequence
  Description of Artificial Sequence: Synthetic probe
ccttgctgacatccaaatagaagat

SEQ ID NO: 828 - DNA, 25 bp, Artificial Sequence
  Description of Artificial Sequence: Synthetic probe
cttgctgacatccaaatagaagata

SEQ ID NO: 829 - DNA, 25 bp, Artificial Sequence
  Description of Artificial Sequence: Synthetic probe
ttgctgacatccaaatagaagatag

SEQ ID NO: 830 - DNA, 25 bp, Artificial Sequence
  Description of Artificial Sequence: Synthetic probe
tgctgacatccaaatagaagatagg

SEQ ID NO: 831 - DNA, 25 bp, Artificial Sequence
  Description of Artificial Sequence: Synthetic probe
gctgacatccaaatagaagatagga

SEQ ID NO: 832 - DNA, 25 bp, Artificial Sequence
  Description of Artificial Sequence: Synthetic probe
gataggactatctaagccctaggtt

SEQ ID NO: 833 - DNA, 25 bp, Artificial Sequence
  Description of Artificial Sequence: Synthetic probe
ataggactatctaagccctaggttt

SEQ ID NO: 834 - DNA, 427 bp, Homo sapiens
  modified_base (132)..(166): a, c, g, t, unknown or other
  modified_base (168)..(178): a, c, g, t, unknown or other
  modified_base (181)..(184): a, c, g, t, unknown or other
  modified_base (187)..(190): a, c, g, t, unknown or other
  modified_base (193)..(194): a, c, g, t, unknown or other
  modified_base (198)..(203): a, c, g, t, unknown or other
  modified_base (205)..(208): a, c, g, t, unknown or other
  modified_base (341)..(358): a, c, g, t, unknown or other
acgtgctcctcagagcagccggagggaggggggaggtcggaggtcgtggaggtggtttgtgtatcttactggtctgaagggaccaagtgtgtttgttgtttgttttgtatcttgtttttctgatcggagcannnnnnnnnnnnnnnnnnnnnnnnnnnnnnnnnnnannnnnnnnnnnaannnnagnnnnggnngggnnnnnngnnnnggatcacttgggatctttgacacttgaaaaattacacctggcagctgcgtttaagccttcccccatcgtgtactgcagagttgagctggcaggggaggggctgagagggtgggggctggaacccctccccggnnnnnnnnnnnnnnnnnncttccatctagaactgtttacatgaagataagatactcactgttcatgaatacacttgatgttcaagta

SEQ ID NO: 835 - DNA, 25 bp, Artificial Sequence
  Description of Artificial Sequence: Synthetic probe
acgtgctcctcagagcagccggagg

SEQ ID NO: 836 - DNA, 25 bp, Artificial Sequence
  Description of Artificial Sequence: Synthetic probe
ggatcacttgggatctttgacactt

SEQ ID NO: 837 - DNA, 25 bp, Artificial Sequence
  Description of Artificial Sequence: Synthetic probe
atcacttgggatctttgacacttga

SEQ ID NO: 838 - DNA, 25 bp, Artificial Sequence
  Description of Artificial Sequence: Synthetic probe
cttgggatctttgacacttgaaaaa

SEQ ID NO: 839 - DNA, 25 bp, Artificial Sequence
  Description of Artificial Sequence: Synthetic probe
acacctggcagctgcgtttaagcct

SEQ ID NO: 840 - DNA, 25 bp, Artificial Sequence
  Description of Artificial Sequence: Synthetic probe
ctggcagctgcgtttaagccttccc

SEQ ID NO: 841 - DNA, 25 bp, Artificial Sequence
  Description of Artificial Sequence: Synthetic probe
ccccatcgtgtactgcagagttgag

SEQ ID NO: 842 - DNA, 25 bp, Artificial Sequence
  Description of Artificial Sequence: Synthetic probe
ccatcgtgtactgcagagttgagct

SEQ ID NO: 843 - DNA, 25 bp, Artificial Sequence
  Description of Artificial Sequence: Synthetic probe
atcgtgtactgcagagttgagctgg

SEQ ID NO: 844 - DNA, 25 bp, Artificial Sequence
  Description of Artificial Sequence: Synthetic probe
tcgtgtactgcagagttgagctggc

SEQ ID NO: 845 - DNA, 25 bp, Artificial Sequence
  Description of Artificial Sequence: Synthetic probe
cgtgtactgcagagttgagctggca

SEQ ID NO: 846 - DNA, 25 bp, Artificial Sequence
  Description of Artificial Sequence: Synthetic probe
tccatctagaactgtttacatgaag

SEQ ID NO: 847 - DNA, 25 bp, Artificial Sequence
  Description of Artificial Sequence: Synthetic probe
tcactgttcatgaatacacttgatg

SEQ ID NO: 848 - DNA, 25 bp, Artificial Sequence
  Description of Artificial Sequence: Synthetic probe
tgttcatgaatacacttgatgttca

SEQ ID NO: 849 - DNA, 25 bp, Artificial Sequence
  Description of Artificial Sequence: Synthetic probe
tcatgaatacacttgatgttcaagt

SEQ ID NO: 850 - DNA, 25 bp, Artificial Sequence
  Description of Artificial Sequence: Synthetic probe
catgaatacacttgatgttcaagta

SEQ ID NO: 851 - DNA, 328 bp, Homo sapiens
actttgcatgggagagaaatccctccaccatctcaagccccggccactgtgcgagcctgtcgagaagcacagcatttctgaggtggaaagattataactgtaatgtgaggttaccctatgtctgcaagttcactgactagtgcaggagggaagtcagcagcctgtgtttggtgtgcaactcatcatgggcatgagaccagtgtgaggactcaccctggaagagaatattcgcttaattcccccaacctgaccacctcattcttatctttcttctgtttcttcctccccgctgtcatttcagtctcttcattttgtcatacggcctaag

SEQ ID NO: 852 - DNA, 25 bp, Artificial Sequence
  Description of Artificial Sequence: Synthetic probe
actttgcatgggagagaaatccctc

SEQ ID NO: 853 - DNA, 25 bp, Artificial Sequence
  Description of Artificial Sequence: Synthetic probe
ggccactgtgcgagcctgtcgagaa

SEQ ID NO: 854 - DNA, 25 bp, Artificial Sequence
  Description of Artificial Sequence: Synthetic probe
gaagcacagcatttctgaggtggaa

SEQ ID NO: 855 - DNA, 25 bp, Artificial Sequence
  Description of Artificial Sequence: Synthetic probe
cacagcatttctgaggtggaaagat

SEQ ID NO: 856 - DNA, 25 bp, Artificial Sequence
  Description of Artificial Sequence: Synthetic probe
ttataactgtaatgtgaggttaccc

SEQ ID NO: 857 - DNA, 25 bp, Artificial Sequence
  Description of Artificial Sequence: Synthetic probe
ataactgtaatgtgaggttacccta

SEQ ID NO: 858 - DNA, 25 bp, Artificial Sequence
  Description of Artificial Sequence: Synthetic probe
taatgtgaggttaccctatgtctgc

SEQ ID NO: 859 - DNA, 25 bp, Artificial Sequence
  Description of Artificial Sequence: Synthetic probe
actgactagtgcaggagggaagtca

SEQ ID NO: 860 - DNA, 25 bp, Artificial Sequence
  Description of Artificial Sequence: Synthetic probe
gtcagcagcctgtgtttggtgtgca

SEQ ID NO: 861 - DNA, 25 bp, Artificial Sequence
  Description of Artificial Sequence: Synthetic probe
gtttggtgtgcaactcatcatgggc

SEQ ID NO: 862 - DNA, 25 bp, Artificial Sequence
  Description of Artificial Sequence: Synthetic probe
ggcatgagaccagtgtgaggactca

SEQ ID NO: 863 - DNA, 25 bp, Artificial Sequence
  Description of Artificial Sequence: Synthetic probe
catgagaccagtgtgaggactcacc

SEQ ID NO: 864 - DNA, 25 bp, Artificial Sequence
  Description of Artificial Sequence: Synthetic probe
actcaccctggaagagaatattcgc

SEQ ID NO: 865 - DNA, 25 bp, Artificial Sequence
  Description of Artificial Sequence: Synthetic probe
tcaccctggaagagaatattcgctt

SEQ ID NO: 866 - DNA, 25 bp, Artificial Sequence
  Description of Artificial Sequence: Synthetic probe
tcagtctcttcattttgtcatacgg

SEQ ID NO: 867 - DNA, 25 bp, Artificial Sequence
  Description of Artificial Sequence: Synthetic probe
tcttcattttgtcatacggcctaag

SEQ ID NO: 868 - DNA, 268 bp, Homo sapiens
cttatggcattgacaaagagaagaccatccaccttaccctgaaagtggtgaagcccagtgatgaggagctgcccttgtttcttgtggagtcaggtgatgaggcaaagaggcacctcctccaggtgcgaaggtccagctcagtggcacaagtgaaagcaatgatcgagactaagacgggtataatccctgagacccagattgtgacttgcaatggaaagagactggaagatgggaagatgatggcagattacggcatcagaaagggcaa

SEQ ID NO: 869 - DNA, 25 bp, Artificial Sequence
  Description of Artificial Sequence: Synthetic probe
cttatggcattgacaaagagaagac

SEQ ID NO: 870 - DNA, 25 bp, Artificial Sequence
  Description of Artificial Sequence: Synthetic probe
gagctgcccttgtttcttgtggagt

SEQ ID NO: 871 - DNA, 25 bp, Artificial Sequence
  Description of Artificial Sequence: Synthetic probe
cccttgtttcttgtggagtcaggtg

SEQ ID NO: 872 - DNA, 25 bp, Artificial Sequence
  Description of Artificial Sequence: Synthetic probe
ccttgtttcttgtggagtcaggtga

SEQ ID NO: 873 - DNA, 25 bp, Artificial Sequence
  Description of Artificial Sequence: Synthetic probe
cctccaggtgcgaaggtccagctca

SEQ ID NO: 874 - DNA, 25 bp, Artificial Sequence
  Description of Artificial Sequence: Synthetic probe
ccaggtgcgaaggtccagctcagtg

SEQ ID NO: 875 - DNA, 25 bp, Artificial Sequence
  Description of Artificial Sequence: Synthetic probe
gcgaaggtccagctcagtggcacaa

SEQ ID NO: 876 - DNA, 25 bp, Artificial Sequence
  Description of Artificial Sequence: Synthetic probe
gctcagtggcacaagtgaaagcaat

SEQ ID NO: 877 - DNA, 25 bp, Artificial Sequence
  Description of Artificial Sequence: Synthetic probe
ctcagtggcacaagtgaaagcaatg

SEQ ID NO: 878 - DNA, 25 bp, Artificial Sequence
  Description of Artificial Sequence: Synthetic probe
agacgggtataatccctgagaccca

SEQ ID NO: 879 - DNA, 25 bp, Artificial Sequence
  Description of Artificial Sequence: Synthetic probe
tataatccctgagacccagattgtg

SEQ ID NO: 880 - DNA, 25 bp, Artificial Sequence
  Description of Artificial Sequence: Synthetic probe
ccctgagacccagattgtgacttgc

SEQ ID NO: 881 - DNA, 25 bp, Artificial Sequence
  Description of Artificial Sequence: Synthetic probe
gacccagattgtgacttgcaatgga

SEQ ID NO: 882 - DNA, 25 bp, Artificial Sequence
  Description of Artificial Sequence: Synthetic probe
ccagattgtgacttgcaatggaaag

SEQ ID NO: 883 - DNA, 25 bp, Artificial Sequence
  Description of Artificial Sequence: Synthetic probe
gcagattacggcatcagaaagggca

SEQ ID NO: 884 - DNA, 25 bp, Artificial Sequence
  Description of Artificial Sequence: Synthetic probe
cagattacggcatcagaaagggcaa

SEQ ID NO: 885 - DNA, 586 bp, Homo sapiens
  modified_base (108)..(108): a, c, g, t, unknown or other
  modified_base (230)..(254): a, c, g, t, unknown or other
  modified_base (417)..(441): a, c, g, t, unknown or other
  modified_base (488)..(488): a, c, g, t, unknown or other
  modified_base (525)..(525): a, c, g, t, unknown or other
  modified_base (541)..(541): a, c, g, t, unknown or other
  modified_base (547)..(548): a, c, g, t, unknown or other
  modified_base (551)..(555): a, c, g, t, unknown or other
  modified_base (558)..(559): a, c, g, t, unknown or other
gctcttcttggcagaggggatgtctggcttgcctgaagggagtggctctgtaaggacgccttgatgctttcttcattaagattttgagcatttttacgtacttgagcntttttttttttttttttcaatttctagaggaactttttctctgttaattcctggaactgtattttgaatccttaaaggtgagccctcatagggagatccaaagtcctgtggttaacgccttnnnnnnnnnnnnnnnnnnnnnnnnnctggggatgtgaacaacctgctcacagtcctcatttactggatttgacttcagccaggtgaactggaatgccttggggcgtggaagggcattaggagtgtttcatttgatatgtgaatgctcataaaaaaatgtcaaggaatgaagaacaacaactctcagtnnnnnnnnnnnnnnnnnnnnnnnnngtgaaagtcaaattcatgtacagtaaatttgttataagaatattcanaagaacactgttctgatatctctgattgtcatgtggntttgaatgtagcttgncagagnnaannnnnaanntatattgacagggcaggaacaccgtct

SEQ ID NO: 886 - DNA, 25 bp, Artificial Sequence
  Description of Artificial Sequence: Synthetic probe
gctcttcttggcagaggggatgtct

SEQ ID NO: 887 - DNA, 25 bp, Artificial Sequence
  Description of Artificial Sequence: Synthetic probe
tggctctgtaaggacgccttgatgc

SEQ ID NO: 888 - DNA, 25 bp, Artificial Sequence
  Description of Artificial Sequence: Synthetic probe
tgtaaggacgccttgatgctttctt

SEQ ID NO: 889 - DNA, 25 bp, Artificial Sequence
  Description of Artificial Sequence: Synthetic probe
tttgagcatttttacgtacttgagc

SEQ ID NO: 890 - DNA, 25 bp, Artificial Sequence
  Description of Artificial Sequence: Synthetic probe
tcctggaactgtattttgaatcctt

SEQ ID NO: 891 - DNA, 25 bp, Artificial Sequence
  Description of Artificial Sequence: Synthetic probe
tccaaagtcctgtggttaacgcctt

SEQ ID NO: 892 - DNA, 25 bp, Artificial Sequence
  Description of Artificial Sequence: Synthetic probe
ggatgtgaacaacctgctcacagtc

SEQ ID NO: 893 - DNA, 25 bp, Artificial Sequence
  Description of Artificial Sequence: Synthetic probe
gatgtgaacaacctgctcacagtcc

SEQ ID NO: 894 - DNA, 25 bp, Artificial Sequence
  Description of Artificial Sequence: Synthetic probe
cacagtcctcatttactggatttga

SEQ ID NO: 895 - DNA, 25 bp, Artificial Sequence
  Description of Artificial Sequence: Synthetic probe
cctcatttactggatttgacttcag

SEQ ID NO: 896 - DNA, 25 bp, Artificial Sequence
  Description of Artificial Sequence: Synthetic probe
ttactggatttgacttcagccaggt

SEQ ID NO: 897 - DNA, 25 bp, Artificial Sequence
  Description of Artificial Sequence: Synthetic probe
acttcagccaggtgaactggaatgc

SEQ ID NO: 898 - DNA, 25 bp, Artificial Sequence
  Description of Artificial Sequence: Synthetic probe
cagccaggtgaactggaatgccttg

SEQ ID NO: 899 - DNA, 25 bp, Artificial Sequence
  Description of Artificial Sequence: Synthetic probe
agaacactgttctgatatctctgat

SEQ ID NO: 900 - DNA, 25 bp, Artificial Sequence
  Description of Artificial Sequence: Synthetic probe
tctgatatctctgattgtcatgtgg

SEQ ID NO: 901 - DNA, 25 bp, Artificial Sequence
  Description of Artificial Sequence: Synthetic probe
tattgacagggcaggaacaccgtct

SEQ ID NO: 902 - DNA, 483 bp, Homo sapiens
ggtactcccgctcagtgcttctcatcacccagcacctcagcctggtggagcaggctgaccacatcctctttctggaaggaggcgctatccgggaggggggaacccaccagcagctcatggagaaaaaggggtgctactgggccatggtgcaggctcctgcagatgctccagaatgaaagccttctcagacctgcgcactccatctccctcccttttcttctctctgtggtggagaaccacagctgcagagtaggcagctgcctccaggatgagttacttgaaatttgccttgagtgtgttacctcctttccaagctcctcgtgataatgcagacttcctggagtacaaacacaggatttgtaattccttactgtaacggagtttagagccagggctgatgctttggtgtggccagcactctgaaactgagaaatgttcagaatgtacggaaagatgatcagctattttcaacataactgaagg

SEQ ID NO: 903 - DNA, 25 bp, Artificial Sequence
  Description of Artificial Sequence: Synthetic probe
ggtactcccgctcagtgcttctcat

SEQ ID NO: 904 - DNA, 25 bp, Artificial Sequence
  Description of Artificial Sequence: Synthetic probe
gcaggctgaccacatcctctttctg

SEQ ID NO: 905 - DNA, 25 bp, Artificial Sequence
  Description of Artificial Sequence: Synthetic probe
catcctctttctggaaggaggcgct

SEQ ID NO: 906 - DNA, 25 bp, Artificial Sequence
  Description of Artificial Sequence: Synthetic probe
ctctttctggaaggaggcgctatcc

SEQ ID NO: 907 - DNA, 25 bp, Artificial Sequence
  Description of Artificial Sequence: Synthetic probe
tgctactgggccatggtgcaggctc

SEQ ID NO: 908 - DNA, 25 bp, Artificial Sequence
  Description of Artificial Sequence: Synthetic probe
ctactgggccatggtgcaggctcct

SEQ ID NO: 909 - DNA, 25 bp, Artificial Sequence
  Description of Artificial Sequence: Synthetic probe
tgctccagaatgaaagccttctcag

SEQ ID NO: 910 - DNA, 25 bp, Artificial Sequence
  Description of Artificial Sequence: Synthetic probe
cttttcttctctctgtggtggagaa

SEQ ID NO: 911 - DNA, 25 bp, Artificial Sequence
  Description of Artificial Sequence: Synthetic probe
ggagaaccacagctgcagagtaggc

SEQ ID NO: 912 - DNA, 25 bp, Artificial Sequence
  Description of Artificial Sequence: Synthetic probe
tgaaatttgccttgagtgtgttacc

SEQ ID NO: 913 - DNA, 25 bp, Artificial Sequence
  Description of Artificial Sequence: Synthetic probe
gaaatttgccttgagtgtgttacct

SEQ ID NO: 914 - DNA, 25 bp, Artificial Sequence
  Description of Artificial Sequence: Synthetic probe
tgagtgtgttacctcctttccaagc

SEQ ID NO: 915 - DNA, 25 bp, Artificial Sequence
  Description of Artificial Sequence: Synthetic probe
tccaagctcctcgtgataatgcaga

SEQ ID NO: 916 - DNA, 25 bp, Artificial Sequence
  Description of Artificial Sequence: Synthetic probe
gtgataatgcagacttcctggagta

SEQ ID NO: 917 - DNA, 25 bp, Artificial Sequence
  Description of Artificial Sequence: Synthetic probe
cactctgaaactgagaaatgttcag

SEQ ID NO: 918 - DNA, 25 bp, Artificial Sequence
  Description of Artificial Sequence: Synthetic probe
cagctattttcaacataactgaagg

SEQ ID NO: 919 - DNA, 218 bp, Homo sapiens
ggccaggcccttttcctgcatgtgccacctccagtgggaaacaaaactaaagagaccactctgtgccaagtcgactatgccttagacacatcctcctaccgtccccaatgccccctgggcaggaggcagtggagaaccaagccccatggcctcagaatttccccccagttccccaagtgtctctggggacctgaagccctggggcttacgttctctct

SEQ ID NO: 920 - DNA, 25 bp, Artificial Sequence
  Description of Artificial Sequence: Synthetic probe
ggccaggcccttttcctgcatgtgc

SEQ ID NO: 921 - DNA, 25 bp, Artificial Sequence
  Description of Artificial Sequence: Synthetic probe
aaactaaagagaccactctgtgcca

SEQ ID NO: 922 - DNA, 25 bp, Artificial Sequence
  Description of Artificial Sequence: Synthetic probe
aactaaagagaccactctgtgccaa

SEQ ID NO: 923 - DNA, 25 bp, Artificial Sequence
  Description of Artificial Sequence: Synthetic probe
gagaccactctgtgccaagtcgact

SEQ ID NO: 924 - DNA, 25 bp, Artificial Sequence
  Description of Artificial Sequence: Synthetic probe
ccactctgtgccaagtcgactatgc

SEQ ID NO: 925 - DNA, 25 bp, Artificial Sequence
  Description of Artificial Sequence: Synthetic probe
cactctgtgccaagtcgactatgcc

SEQ ID NO: 926 - DNA, 25 bp, Artificial Sequence
  Description of Artificial Sequence: Synthetic probe
gtgccaagtcgactatgccttagac

SEQ ID NO: 927 - DNA, 25 bp, Artificial Sequence
  Description of Artificial Sequence: Synthetic probe
gtcgactatgccttagacacatcct

SEQ ID NO: 928 - DNA, 25 bp, Artificial Sequence
  Description of Artificial Sequence: Synthetic probe
cagtggagaaccaagccccatggcc

SEQ ID NO: 929 - DNA, 25 bp, Artificial Sequence
  Description of Artificial Sequence: Synthetic probe
agtggagaaccaagccccatggcct

SEQ ID NO: 930 - DNA, 25 bp, Artificial Sequence
  Description of Artificial Sequence: Synthetic probe
cccagttccccaagtgtctctgggg

SEQ ID NO: 931 - DNA, 25 bp, Artificial Sequence
  Description of Artificial Sequence: Synthetic probe
ccagttccccaagtgtctctgggga

SEQ ID NO: 932 - DNA, 25 bp, Artificial Sequence
  Description of Artificial Sequence: Synthetic probe
cccaagtgtctctggggacctgaag

SEQ ID NO: 933 - DNA, 25 bp, Artificial Sequence
  Description of Artificial Sequence: Synthetic probe
gtgtctctggggacctgaagccctg

SEQ ID NO: 934 - DNA, 24 bp, Artificial Sequence
  Description of Artificial Sequence: Synthetic probe
tgtctctggggcctgaagccctgg

SEQ ID NO: 935 - DNA, 25 bp, Artificial Sequence
  Description of Artificial Sequence: Synthetic probe
aagccctggggcttacgttctctct

SEQ ID NO: 936 - DNA, 467 bp, Homo sapiens
  modified_base (26)..(26): a, c, g, t, unknown or other
  modified_base (134)..(134): a, c, g, t, unknown or other
  modified_base (240)..(337): a, c, g, t, unknown or other
  modified_base (339)..(344): a, c, g, t, unknown or other
  modified_base (359)..(368): a, c, g, t, unknown or other
  modified_base (370)..(372): a, c, g, t, unknown or other
  modified_base (374)..(375): a, c, g, t, unknown or other
  modified_base (377)..(378): a, c, g, t, unknown or other
  modified_base (380)..(380): a, c, g, t, unknown or other
  modified_base (414)..(440): a, c, g, t, unknown or other
tccccctagggctcaggcactgaggngcctggggacagtggagcatatgggtgggagacagatggagggtaccctatttacaactgagtcagccaagccactgatgggaatatacagatttaggtgctaaaccntttattttccacggatgagtcacaatctgaagaatcaaacttccatcctgaaaatctatatgtttcaaaaccacttgccatcctgttagattgccagttcctgggnnnnnnnnnnnnnnnnnnnnnnnnnnnnnnnnnnnnnnnnnnnnnnnnnnnnnnnnnnnnnnnnnnnnnnnnnnnnnnnnnnnnnnnnnnnnnnnnnnannnnnnaaaaaaaaaaaaaannnnnnnnnnannnannannanattgagggcctccaggacttggcaagtcttggtnnnnnnnnnnnnnnnnnnnnnnnnnnngatgggcaggcaaatctgtccgttctc

SEQ ID NO: 937 - DNA, 25 bp, Artificial Sequence
  Description of Artificial Sequence: Synthetic probe
tccccctagggctcaggcactgagg

SEQ ID NO: 938 - DNA, 25 bp, Artificial Sequence
  Description of Artificial Sequence: Synthetic probe
tggagggtaccctatttacaactga

SEQ ID NO: 939 - DNA, 25 bp, Artificial Sequence
  Description of Artificial Sequence: Synthetic probe
cctatttacaactgagtcagccaag

SEQ ID NO: 940 - DNA, 25 bp, Artificial Sequence
  Description of Artificial Sequence: Synthetic probe
ctatttacaactgagtcagccaagc

SEQ ID NO: 941 - DNA, 25 bp, Artificial Sequence
  Description of Artificial Sequence: Synthetic probe
atttacaactgagtcagccaagcca

SEQ ID NO: 942 - DNA, 25 bp, Artificial Sequence
  Description of Artificial Sequence: Synthetic probe
actgagtcagccaagccactgatgg

SEQ ID NO: 943 - DNA, 25 bp, Artificial Sequence
  Description of Artificial Sequence: Synthetic probe
ccaagccactgatgggaatatacag

SEQ ID NO: 944 - DNA, 25 bp, Artificial Sequence
  Description of Artificial Sequence: Synthetic probe
tattttccacggatgagtcacaatc

SEQ ID NO: 945 - DNA, 25 bp, Artificial Sequence
  Description of Artificial Sequence: Synthetic probe
tttccacggatgagtcacaatctga

SEQ ID NO: 946 - DNA, 25 bp, Artificial Sequence
  Description of Artificial Sequence: Synthetic probe
tgagtcacaatctgaagaatcaaac

SEQ ID NO: 947 - DNA, 25 bp, Artificial Sequence
  Description of Artificial Sequence: Synthetic probe
aaccacttgccatcctgttagattg

SEQ ID NO: 948 - DNA, 25 bp, Artificial Sequence
  Description of Artificial Sequence: Synthetic probe
ccatcctgttagattgccagttcct

SEQ ID NO: 949 - DNA, 25 bp, Artificial Sequence
  Description of Artificial Sequence: Synthetic probe
atcctgttagattgccagttcctgg

SEQ ID NO: 950 - DNA, 25 bp, Artificial Sequence
  Description of Artificial Sequence: Synthetic probe
attgagggcctccaggacttggcaa

SEQ ID NO: 951 - DNA, 25 bp, Artificial Sequence
  Description of Artificial Sequence: Synthetic probe
gcctccaggacttggcaagtcttgg

SEQ ID NO: 952 - DNA, 25 bp, Artificial Sequence
  Description of Artificial Sequence: Synthetic probe
tgggcaggcaaatctgtccgttctc

SEQ ID NO: 953 - DNA, 307 bp, Homo sapiens
  modified_base (48)..(89): a, c, g, t, unknown or other
  modified_base (103)..(103): a, c, g, t, unknown or other
  modified_base (105)..(105): a, c, g, t, unknown or other
  modified_base (110)..(110): a, c, g, t, unknown or other
  modified_base (140)..(198): a, c, g, t, unknown or other
  modified_base (249)..(282): a, c, g, t, unknown or other
ctttccgcctctttgagaccaagatcacccaagtcctgcacttcaccnnnnnnnnnnnnnnnnnnnnnnnnnnnnnnnnnnnnnnnnnngttcgagcctcctngncgccnttcgcttggaacctgggaaagaatatttgnnnnnnnnnnnnnnnnnnnnnnnnnnnnnnnnnnnnnnnnnnnnnnnnnnnnnnnnnnnctcgaatagctggatcgaggagatgccctctgaacgcctgtgccggagcannnnnnnnnnnnnnnnnnnnnnnnnnnnnnnnnncttcctccaggagtatggcactcag

SEQ ID NO: 954 - DNA, 25 bp, Artificial Sequence
  Description of Artificial Sequence: Synthetic probe
ctttccgcctctttgagaccaagat

SEQ ID NO: 955 - DNA, 25 bp, Artificial Sequence
  Description of Artificial Sequence: Synthetic probe
tttccgcctctttgagaccaagatc

SEQ ID NO: 956 - DNA, 25 bp, Artificial Sequence
  Description of Artificial Sequence: Synthetic probe
ttccgcctctttgagaccaagatca

SEQ ID NO: 957 - DNA, 25 bp, Artificial Sequence
  Description of Artificial Sequence: Synthetic probe
tccgcctctttgagaccaagatcac

SEQ ID NO: 958 - DNA, 25 bp, Artificial Sequence
  Description of Artificial Sequence: Synthetic probe
gcctctttgagaccaagatcaccca

SEQ ID NO: 959 - DNA, 25 bp, Artificial Sequence
  Description of Artificial Sequence: Synthetic probe
gagaccaagatcacccaagtcctgc

SEQ ID NO: 960 - DNA, 25 bp, Artificial Sequence
  Description of Artificial Sequence: Synthetic probe
ttcgcttggaacctgggaaagaata

SEQ ID NO: 961 - DNA, 25 bp, Artificial Sequence
  Description of Artificial Sequence: Synthetic probe
tcgcttggaacctgggaaagaatat

SEQ ID NO: 962 - DNA, 25 bp, Artificial Sequence
  Description of Artificial Sequence: Synthetic probe
ctcgaatagctggatcgaggagatg

SEQ ID NO: 963 - DNA, 25 bp, Artificial Sequence
  Description of Artificial Sequence: Synthetic probe
tagctggatcgaggagatgccctct

SEQ ID NO: 964 - DNA, 25 bp, Artificial Sequence
  Description of Artificial Sequence: Synthetic probe
gaggagatgccctctgaacgcctgt

SEQ ID NO: 965 - DNA, 25 bp, Artificial Sequence
  Description of Artificial Sequence: Synthetic probe
aggagatgccctctgaacgcctgtg

SEQ ID NO: 966 - DNA, 25 bp, Artificial Sequence
  Description of Artificial Sequence: Synthetic probe
gagatgccctctgaacgcctgtgcc

SEQ ID NO: 967 - DNA, 25 bp, Artificial Sequence
  Description of Artificial Sequence: Synthetic probe
agatgccctctgaacgcctgtgccg

SEQ ID NO: 968 - DNA, 25 bp, Artificial Sequence
  Description of Artificial Sequence: Synthetic probe
gatgccctctgaacgcctgtgccgg

SEQ ID NO: 969 - DNA, 25 bp, Artificial Sequence
  Description of Artificial Sequence: Synthetic probe
cttcctccaggagtatggcactcag

SEQ ID NO: 970 - DNA, 370 bp, Homo sapiens
  modified_base (96)..(112): a, c, g, t, unknown or other
ctacaattacagcatatgggcaatacagaatttacctaaaaggatactaatttggaacaaaaaaaatcacctttcgcacatgtatcatgtcacaannnnnnnnnnnnnnnnncaaatagaggttgcaaatattgtcagattgtcaggctgtaagaaaggatgaaattcatttcccattgcatcatcttgtggcccatggatttcaagtgccttagccaaaatcatatagctagttagcagtagagccgagactcagaaaaaaacaaagtaaaacaggcagactgaaacaaaaagtcttctaattcccagtccacatgtaaaatttgcttcatataaacaaacctaattgtaaatggcactgtagcaacag

SEQ ID NO: 971 - DNA, 25 bp, Artificial Sequence
  Description of Artificial Sequence: Synthetic probe
ctacaattacagcatatgggcaata

SEQ ID NO: 972 - DNA, 25 bp, Artificial Sequence
  Description of Artificial Sequence: Synthetic probe
catttcccattgcatcatcttgtgg

SEQ ID NO: 973 - DNA, 25 bp, Artificial Sequence
  Description of Artificial Sequence: Synthetic probe
tgcatcatcttgtggcccatggatt

SEQ ID NO: 974 - DNA, 25 bp, Artificial Sequence
  Description of Artificial Sequence: Synthetic probe
tcttgtggcccatggatttcaagtg

SEQ ID NO: 975 - DNA, 25 bp, Artificial Sequence
  Description of Artificial Sequence: Synthetic probe
tggcccatggatttcaagtgcctta

SEQ ID NO: 976 - DNA, 25 bp, Artificial Sequence
  Description of Artificial Sequence: Synthetic probe
atggatttcaagtgccttagccaaa

SEQ ID NO: 977 - DNA, 25 bp, Artificial Sequence
  Description of Artificial Sequence: Synthetic probe
agtgccttagccaaaatcatatagc

SEQ ID NO: 978 - DNA, 25 bp, Artificial Sequence
  Description of Artificial Sequence: Synthetic probe
gccttagccaaaatcatatagctag

SEQ ID NO: 979 - DNA, 25 bp, Artificial Sequence
  Description of Artificial Sequence: Synthetic probe
tagccaaaatcatatagctagttag

SEQ ID NO: 980 - DNA, 25 bp, Artificial Sequence
  Description of Artificial Sequence: Synthetic probe
ccaaaatcatatagctagttagcag

SEQ ID NO: 981 - DNA, 25 bp, Artificial Sequence
  Description of Artificial Sequence: Synthetic probe
tcatatagctagttagcagtagagc

SEQ ID NO: 982 - DNA, 25 bp, Artificial Sequence
  Description of Artificial Sequence: Synthetic probe
tagctagttagcagtagagccgaga

SEQ ID NO: 983 - DNA, 25 bp, Artificial Sequence
  Description of Artificial Sequence: Synthetic probe
tagttagcagtagagccgagactca

SEQ ID NO: 984 - DNA, 25 bp, Artificial Sequence
  Description of Artificial Sequence: Synthetic probe
gcagtagagccgagactcagaaaaa

SEQ ID NO: 985 - DNA, 25 bp, Artificial Sequence
  Description of Artificial Sequence: Synthetic probe
caaacctaattgtaaatggcactgt

SEQ ID NO: 986 - DNA, 25 bp, Artificial Sequence
  Description of Artificial Sequence: Synthetic probe
attgtaaatggcactgtagcaacag

SEQ ID NO: 987 - DNA, 439 bp, Homo sapiens
attaactctacctgcacactgtcctattatattcattctttttgaaatgtcaaccccaagttagttcaatctggattcatatttaatttgaaggtagaatgttttcaaatgttctccagtcattatgttaatatttctgaggagcctgcaacatgccagccactgtgatagaggctggcggatccaagcaaatggccaatgagatcattgtgaaggcaggggaatgtatgtgcacatctgttttgtaactgtttagatgaatgtcagttgttatttattgaaatgatttcacagtgtgtggtcaacatttctcatgttgaaactttaagaactaaaatgttctaaatatcccttggacattttatgtctttcttgtaaggcatactgccttgtttaatggtagttttacagtgtttctggcttagaacaaaggggctta

SEQ ID NO: 988 - DNA, 25 bp, Artificial Sequence
  Description of Artificial Sequence: Synthetic probe
attaactctacctgcacactgtcct

SEQ ID NO: 989 - DNA, 25 bp, Artificial Sequence
  Description of Artificial Sequence: Synthetic probe
tttgaaatgtcaaccccaagttagt

SEQ ID NO: 990 - DNA, 25 bp, Artificial Sequence
  Description of Artificial Sequence: Synthetic probe
atgttttcaaatgttctccagtcat

SEQ ID NO: 991 - DNA, 25 bp, Artificial Sequence
  Description of Artificial Sequence: Synthetic probe
tttcaaatgttctccagtcattatg

SEQ ID NO: 992 - DNA, 25 bp, Artificial Sequence
  Description of Artificial Sequence: Synthetic probe
tcaaatgttctccagtcattatgtt

SEQ ID NO: 993 - DNA, 25 bp, Artificial Sequence
  Description of Artificial Sequence: Synthetic probe
atatttctgaggagcctgcaacatg

SEQ ID NO: 994 - DNA, 25 bp, Artificial Sequence
  Description of Artificial Sequence: Synthetic probe
gaggagcctgcaacatgccagccac

SEQ ID NO: 995 - DNA, 25 bp, Artificial Sequence
  Description of Artificial Sequence: Synthetic probe
ctggcggatccaagcaaatggccaa

SEQ ID NO: 996 - DNA, 25 bp, Artificial Sequence
  Description of Artificial Sequence: Synthetic probe
cggatccaagcaaatggccaatgag

SEQ ID NO: 997 - DNA, 25 bp, Artificial Sequence
  Description of Artificial Sequence: Synthetic probe
tgtgcacatctgttttgtaactgtt

SEQ ID NO: 998 - DNA, 25 bp, Artificial Sequence
  Description of Artificial Sequence: Synthetic probe
tgcacatctgttttgtaactgttta

SEQ ID NO: 999 - DNA, 25 bp, Artificial Sequence
  Description of Artificial Sequence: Synthetic probe
cacatctgttttgtaactgtttaga

SEQ ID NO: 1000 - DNA, 25 bp, Artificial Sequence
  Description of Artificial Sequence: Synthetic probe
gttttacagtgtttctggcttagaa

SEQ ID NO: 1001 - DNA, 25 bp, Artificial Sequence
  Description of Artificial Sequence: Synthetic probe
tttacagtgtttctggcttagaaca

SEQ ID NO: 1002 - DNA, 25 bp, Artificial Sequence
  Description of Artificial Sequence: Synthetic probe
gtttctggcttagaacaaaggggct

SEQ ID NO: 1003 - DNA, 25 bp, Artificial Sequence
  Description of Artificial Sequence: Synthetic probe
ttctggcttagaacaaaggggctta

SEQ ID NO: 1004 - DNA, 288 bp, Homo sapiens
  modified_base (148)..(164): a, c, g, t, unknown or other
taccacaagtactccctgataaaggggaatttccatgccgtctacagggatgacctgaagaaattgctagagaccgagtgtcctcagtatatcaggaaaaagggtgcagacgtctggttcaaagagttggatatcaacactgatggtnnnnnnnnnnnnnnnnngttcctcattctggtgataaagatgggcgtggcagcccacaaaaaaagccatgaagaaagccacaaagagtagctgagttactgggcccagaggctgggcccctggacatgtacctgcagaata

SEQ ID NO: 1005 - DNA, 25 bp, Artificial Sequence
  Description of Artificial Sequence: Synthetic probe
taccacaagtactccctgataaagg

SEQ ID NO: 1006 - DNA, 25 bp, Artificial Sequence
  Description of Artificial Sequence: Synthetic probe
caagtactccctgataaaggggaat

SEQ ID NO: 1007 - DNA, 25 bp, Artificial Sequence
  Description of Artificial Sequence: Synthetic probe
aaggggaatttccatgccgtctaca

SEQ ID NO: 1008 - DNA, 25 bp, Artificial Sequence
  Description of Artificial Sequence: Synthetic probe
ctacagggatgacctgaagaaattg

SEQ ID NO: 1009 - DNA, 25 bp, Artificial Sequence
  Description of Artificial Sequence: Synthetic probe
gaaattgctagagaccgagtgtcct

SEQ ID NO: 1010 - DNA, 25 bp, Artificial Sequence
  Description of Artificial Sequence: Synthetic probe
gaccgagtgtcctcagtatatcagg

SEQ ID NO: 1011 - DNA, 25 bp, Artificial Sequence
  Description of Artificial Sequence: Synthetic probe
tcctcagtatatcaggaaaaagggt

SEQ ID NO: 1012 - DNA, 25 bp, Artificial Sequence
  Description of Artificial Sequence: Synthetic probe
aaagggtgcagacgtctggttcaaa

SEQ ID NO: 1013 - DNA, 25 bp, Artificial Sequence
  Description of Artificial Sequence: Synthetic probe
cgtctggttcaaagagttggatatc

SEQ ID NO: 1014 - DNA, 25 bp, Artificial Sequence
  Description of Artificial Sequence: Synthetic probe
gttcctcattctggtgataaagatg

SEQ ID NO: 1015 - DNA, 25 bp, Artificial Sequence
  Description of Artificial Sequence: Synthetic probe
cctcattctggtgataaagatgggc

SEQ ID NO: 1016 - DNA, 25 bp, Artificial Sequence
  Description of Artificial Sequence: Synthetic probe
ctcattctggtgataaagatgggcg

SEQ ID NO: 1017 - DNA, 25 bp, Artificial Sequence
  Description of Artificial Sequence: Synthetic probe
aagagtagctgagttactgggccca

SEQ ID NO: 1018 - DNA, 25 bp, Artificial Sequence
  Description of Artificial Sequence: Synthetic probe
tagctgagttactgggcccagaggc

SEQ ID NO: 1019 - DNA, 25 bp, Artificial Sequence
  Description of Artificial Sequence: Synthetic probe
aggctgggcccctggacatgtacct

SEQ ID NO: 1020 - DNA, 25 bp, Artificial Sequence
  Description of Artificial Sequence: Synthetic probe
cccctggacatgtacctgcagaata

SEQ ID NO: 1021 - DNA, 403 bp, Homo sapiens
cctcaaatttgaacatgtggcttgaattaagaagaaaattatggcatatattaaaagcaggcttctatgaaagactcaaaaagctgcctgggaggcagatggaacttgagcctgtcaagaggcaaaggaatccatgtagtagatatcctctgcttaaaaactcactacggaggagaattaagtcctacttttaaagaatttctttataaaatttactgtctaagattaatagcattcgaagatccccagacttcatagaatactcagggaaagcatttaaagggtgatgtacacatgtatcctttcacacatttgccttgacaaacttctttcactcacatctttttcactgactttttttgtggggggcggggccggggggactctggtatctaattcttta

SEQ ID NO: 1022 - DNA, 25 bp, Artificial Sequence
  Description of Artificial Sequence: Synthetic probe
cctcaaatttgaacatgtggcttga

SEQ ID NO: 1023 - DNA, 25 bp, Artificial Sequence
  Description of Artificial Sequence: Synthetic probe
ttaaaagcaggcttctatgaaagac

SEQ ID NO: 1024 - DNA, 25 bp, Artificial Sequence
  Description of Artificial Sequence: Synthetic probe
aaagcaggcttctatgaaagactca

SEQ ID NO: 1025 - DNA, 25 bp, Artificial Sequence
  Description of Artificial Sequence: Synthetic probe
ggcttctatgaaagactcaaaaagc

SEQ ID NO: 1026 - DNA, 25 bp, Artificial Sequence
  Description of Artificial Sequence: Synthetic probe
agactcaaaaagctgcctgggaggc

SEQ ID NO: 1027 - DNA, 25 bp, Artificial Sequence
  Description of Artificial Sequence: Synthetic probe
gactcaaaaagctgcctgggaggca

SEQ ID NO: 1028 - DNA, 25 bp, Artificial Sequence
  Description of Artificial Sequence: Synthetic probe
cagatggaacttgagcctgtcaaga

SEQ ID NO: 1029 - DNA, 25 bp, Artificial Sequence
  Description of Artificial Sequence: Synthetic probe
agatggaacttgagcctgtcaagag

SEQ ID NO: 1030 - DNA, 25 bp, Artificial Sequence
  Description of Artificial Sequence: Synthetic probe
gaacttgagcctgtcaagaggcaaa

SEQ ID NO: 1031 - DNA, 25 bp, Artificial Sequence
  Description of Artificial Sequence: Synthetic probe
ctgcttaaaaactcactacggagga

SEQ ID NO: 1032 - DNA, 25 bp, Artificial Sequence
  Description of Artificial Sequence: Synthetic probe
ctcactacggaggagaattaagtcc

SEQ ID NO: 1033 - DNA, 25 bp, Artificial Sequence
  Description of Artificial Sequence: Synthetic probe
ttaatagcattcgaagatccccaga

SEQ ID NO: 1034 - DNA, 25 bp, Artificial Sequence
  Description of Artificial Sequence: Synthetic probe
ccagacttcatagaatactcaggga

SEQ ID NO: 1035 - DNA, 25 bp, Artificial Sequence
  Description of Artificial Sequence: Synthetic probe
ttcatagaatactcagggaaagcat

SEQ ID NO: 1036 - DNA, 25 bp, Artificial Sequence
  Description of Artificial Sequence: Synthetic probe
gtgatgtacacatgtatcctttcac

SEQ ID NO: 1037 - DNA, 25 bp, Artificial Sequence
  Description of Artificial Sequence: Synthetic probe
ggggactctggtatctaattcttta

SEQ ID NO: 1038 - DNA, 354 bp, Homo sapiens
  modified_base (35)..(95): a, c, g, t, unknown or other
  modified_base (156)..(170): a, c, g, t, unknown or other
tgcagcctttggtagctaacagtcactgattttannnnnnnnnnnnnnnnnnnnnnnnnnnnnnnnnnnnnnnnnnnnnnnnnnnnnnnnnnnnnggaggtaaataaactaagatattccgagggaagggacccaggccacctcccttccgcaggnnnnnnnnnnnnnnnttttttgaatgaaatgccactgtgcattttcagaaaaaaaaatctctgataaacagactttgaatggatgtttgttcctcctgattctcttttctcttcgtggcgacttagagttggcggatattcggaactgtgaatgtacatagcgttgagttaaaccccttgtgtgtgagacaggacgcag

SEQ ID NO: 1039 - DNA, 25 bp, Artificial Sequence
  Description of Artificial Sequence: Synthetic probe
tgcagcctttggtagctaacagtca

SEQ ID NO: 1040 - DNA, 25 bp, Artificial Sequence
  Description of Artificial Sequence: Synthetic probe
cctgattctcttttctcttcgtggc

SEQ ID NO: 1041 - DNA, 25 bp, Artificial Sequence
  Description of Artificial Sequence: Synthetic probe
cttttctcttcgtggcgacttagag

SEQ ID NO: 1042 - DNA, 25 bp, Artificial Sequence
  Description of Artificial Sequence: Synthetic probe
tcttcgtggcgacttagagttggcg

SEQ ID NO: 1043 - DNA, 25 bp, Artificial Sequence
  Description of Artificial Sequence: Synthetic probe
ggcgacttagagttggcggatattc

SEQ ID NO: 1044 - DNA, 25 bp, Artificial Sequence
  Description of Artificial Sequence: Synthetic probe
gcgacttagagttggcggatattcg

SEQ ID NO: 1045 - DNA, 25 bp, Artificial Sequence
  Description of Artificial Sequence: Synthetic probe
cggatattcggaactgtgaatgtac

SEQ ID NO: 1046 - DNA, 25 bp, Artificial Sequence
  Description of Artificial Sequence: Synthetic probe
atgtacatagcgttgagttaaaccc

SEQ ID NO: 1047 - DNA, 25 bp, Artificial Sequence
  Description of Artificial Sequence: Synthetic probe
tgtacatagcgttgagttaaacccc

SEQ ID NO: 1048 - DNA, 25 bp, Artificial Sequence
  Description of Artificial Sequence: Synthetic probe
agcgttgagttaaaccccttgtgtg

SEQ ID NO: 1049 - DNA, 25 bp, Artificial Sequence
  Description of Artificial Sequence: Synthetic probe
gcgttgagttaaaccccttgtgtgt

SEQ ID NO: 1050 - DNA, 25 bp, Artificial Sequence
  Description of Artificial Sequence: Synthetic probe
gagttaaaccccttgtgtgtgagac

SEQ ID NO: 1051 - DNA, 25 bp, Artificial Sequence
  Description of Artificial Sequence: Synthetic probe
agttaaaccccttgtgtgtgagaca

SEQ ID NO: 1052 - DNA, 25 bp, Artificial Sequence
  Description of Artificial Sequence: Synthetic probe
aaaccccttgtgtgtgagacaggac

SEQ ID NO: 1053 - DNA, 25 bp, Artificial Sequence
  Description of Artificial Sequence: Synthetic probe
accccttgtgtgtgagacaggacgc

SEQ ID NO: 1054 - DNA, 25 bp, Artificial Sequence
  Description of Artificial Sequence: Synthetic probe
cccttgtgtgtgagacaggacgcag

SEQ ID NO: 1055 - DNA, 377 bp, Homo sapiens
  modified_base (41)..(67): a, c, g, t, unknown or other
ctatgggcagtatgatctgtggctgggataagaagggtccnnnnnnnnnnnnnnnnnnnnnnnnnnngactcggctctcaggaaatatgttctccacgggtagtgggaacacttatgcctacggggtcatggacagtggctatcggcctaatcttagccctgaagaggcctatgaccttggccgcagggctattgcttatgccactcacagagacagctattctggaggcgttgtcaatatgtaccacatgaaggaagatggttgggtgaaagtagaaagtacagatgtcagtgacctgctgcaccagtaccgggaagccaatcaataatggtggtggtggcagctgggcaggtctcctctgggaggtcttggccga

SEQ ID NO: 1056 - DNA, 25 bp, Artificial Sequence
  Description of Artificial Sequence: Synthetic probe
ctatgggcagtatgatctgtggctg

SEQ ID NO: 1057 - DNA, 25 bp, Artificial Sequence
  Description of Artificial Sequence: Synthetic probe
gactcggctctcaggaaatatgttc

SEQ ID NO: 1058 - DNA, 25 bp, Artificial Sequence
  Description of Artificial Sequence: Synthetic probe
ctccacgggtagtgggaacacttat

SEQ ID NO: 1059 - DNA, 25 bp, Artificial Sequence
  Description of Artificial Sequence: Synthetic probe
agtgggaacacttatgcctacgggg

SEQ ID NO: 1060 - DNA, 25 bp, Artificial Sequence
  Description of Artificial Sequence: Synthetic probe
acacttatgcctacggggtcatgga

SEQ ID NO: 1061 - DNA, 25 bp, Artificial Sequence
  Description of Artificial Sequence: Synthetic probe
gaccttggccgcagggctattgctt

SEQ ID NO: 1062 - DNA, 25 bp, Artificial Sequence
  Description of Artificial Sequence: Synthetic probe
tgcttatgccactcacagagacagc

SEQ ID NO: 1063 - DNA, 25 bp, Artificial Sequence
  Description of Artificial Sequence: Synthetic probe
tcacagagacagctattctggaggc

SEQ ID NO: 1064 - DNA, 25 bp, Artificial Sequence
  Description of Artificial Sequence: Synthetic probe
tctggaggcgttgtcaatatgtacc

SEQ ID NO: 1065 - DNA, 25 bp, Artificial Sequence
  Description of Artificial Sequence: Synthetic probe
cgttgtcaatatgtaccacatgaag

SEQ ID NO: 1066 - DNA, 25 bp, Artificial Sequence
  Description of Artificial Sequence: Synthetic probe
tcaatatgtaccacatgaaggaaga

SEQ ID NO: 1067 - DNA, 25 bp, Artificial Sequence
  Description of Artificial Sequence: Synthetic probe
caatatgtaccacatgaaggaagat

SEQ ID NO: 1068 - DNA, 25 bp, Artificial Sequence
  Description of Artificial Sequence: Synthetic probe
tacagatgtcagtgacctgctgcac

SEQ ID NO: 1069 - DNA, 25 bp, Artificial Sequence
  Description of Artificial Sequence: Synthetic probe
cagtgacctgctgcaccagtaccgg

SEQ ID NO: 1070 - DNA, 25 bp, Artificial Sequence
  Description of Artificial Sequence: Synthetic probe
accgggaagccaatcaataatggtg

SEQ ID NO: 1071 - DNA, 25 bp, Artificial Sequence
  Description of Artificial Sequence: Synthetic probe
gtctcctctgggaggtcttggccga

SEQ ID NO: 1072 - DNA, 457 bp, Homo sapiens
  modified_base (29)..(29): a, c, g, t, unknown or other
  modified_base (31)..(31): a, c, g, t, unknown or other
  modified_base (397)..(412): a, c, g, t, unknown or other
ggttcagggccttccacttcctgaaccgntncccctccgtgtacctgcgttgtaaaatggtggtgtgcagagcgtatgacccctcttcccgctgctaccgaggctgtgtgttgaggtcgaagagggatgtgggctcctaccaggaaaaggtggacgtcgtcctgggtcccatccagctgcagacccccccacgccgagaagaggagcctcggtaggtggtcgctctcagaccccactgtccaccggggcgcagacccctgactcggggacttgggatgttcctcttggtgtcatattccaactcagattgagccctacattgtgctgcacctggtcatacggagttgaatcagacctggttcccgcctcccccaaggctcatggtccttggaggacnnnnnnnnnnnnnnnntcaagagagttctgacctggatggcccatagacctgacgtcccag

SEQ ID NO: 1073 - DNA, 25 bp, Artificial Sequence
  Description of Artificial Sequence: Synthetic probe
ggttcagggccttccacttcctgaa

SEQ ID NO: 1074 - DNA, 25 bp, Artificial Sequence
  Description of Artificial Sequence: Synthetic probe
cctccgtgtacctgcgttgtaaaat

SEQ ID NO: 1075 - DNA, 25 bp, Artificial Sequence
  Description of Artificial Sequence: Synthetic probe
cctgcgttgtaaaatggtggtgtgc

SEQ ID NO: 1076 - DNA, 25 bp, Artificial Sequence
  Description of Artificial Sequence: Synthetic probe
gtgcagagcgtatgacccctcttcc

SEQ ID NO: 1077 - DNA, 25 bp, Artificial Sequence
  Description of Artificial Sequence: Synthetic probe
gggatgtgggctcctaccaggaaaa

SEQ ID NO: 1078 - DNA, 25 bp, Artificial Sequence
  Description of Artificial Sequence: Synthetic probe
gtcctgggtcccatccagctgcaga

SEQ ID NO: 1079 - DNA, 25 bp, Artificial Sequence
  Description of Artificial Sequence: Synthetic probe
ccacgccgagaagaggagcctcggt

SEQ ID NO: 1080 - DNA, 25 bp, Artificial Sequence
  Description of Artificial Sequence: Synthetic probe
taggtggtcgctctcagaccccact

SEQ ID NO: 1081 - DNA, 25 bp, Artificial Sequence
  Description of Artificial Sequence: Synthetic probe
ggcgcagacccctgactcggggact

SEQ ID NO: 1082 - DNA, 25 bp, Artificial Sequence
  Description of Artificial Sequence: Synthetic probe
gtgctgcacctggtcatacggagtt

SEQ ID NO: 1083 - DNA, 25 bp, Artificial Sequence
  Description of Artificial Sequence: Synthetic probe
ctgcacctggtcatacggagttgaa

SEQ ID NO: 1084 - DNA, 25 bp, Artificial Sequence
  Description of Artificial Sequence: Synthetic probe
gttgaatcagacctggttcccgcct

SEQ ID NO: 1085 - DNA, 25 bp, Artificial Sequence
  Description of Artificial Sequence: Synthetic probe
ccaaggctcatggtccttggaggac

SEQ ID NO: 1086 - DNA, 25 bp, Artificial Sequence
  Description of Artificial Sequence: Synthetic probe
aagagagttctgacctggatggccc

SEQ ID NO: 1087 - DNA, 25 bp, Artificial Sequence
  Description of Artificial Sequence: Synthetic probe
tggatggcccatagacctgacgtcc

SEQ ID NO: 1088 - DNA, 25 bp, Artificial Sequence
  Description of Artificial Sequence: Synthetic probe
atggcccatagacctgacgtcccag

SEQ ID NO: 1089 - DNA, 501 bp, Homo sapiens
  modified_base (222)..(257): a, c, g, t, unknown or other
  modified_base (302)..(302): a, c, g, t, unknown or other
  modified_base (375)..(375): a, c, g, t, unknown or other
  modified_base (382)..(382): a, c, g, t, unknown or other
  modified_base (402)..(402): a, c, g, t, unknown or other
agacgatgacttgcaaaatgtcgcagctggaacgcaacatagagaccatcatcaacaccttccaccaatactctgtgaagctggggcacccagacaccctgaaccagggggaattcaaagagctggtgcgaaaagatctgcaaaattttctcaagaaggagaataagaatgaaaaggtcatagaacacatcatggaggacctggacacaaatgcagacaagnnnnnnnnnnnnnnnnnnnnnnnnnnnnnnnnnnnnaggctaacctgggcctcccacgagaagatgcacgagggtgacganggccctggccaccaccataagccaggcctcggggagggcaccccctaagaccacagtggccaagatcacagtngccacgnccacggccacagtcatggtngccacggccacagccactaatcaggaggccaggccaccctgcctctacccaaccagggccccggggcctgttatgtcaaactgtcttggctgtggggct

SEQ ID NO: 1090 - DNA, 25 bp, Artificial Sequence
  Description of Artificial Sequence: Synthetic probe
agacgatgacttgcaaaatgtcgca

SEQ ID NO: 1091 - DNA, 25 bp, Artificial Sequence
  Description of Artificial Sequence: Synthetic probe
atgtcgcagctggaacgcaacatag

SEQ ID NO: 1092 - DNA, 25 bp, Artificial Sequence
  Description of Artificial Sequence: Synthetic probe
gaacgcaacatagagaccatcatca

SEQ ID NO: 1093 - DNA, 25 bp, Artificial Sequence
  Description of Artificial Sequence: Synthetic probe
caccaatactctgtgaagctggggc

SEQ ID NO: 1094 - DNA, 25 bp, Artificial Sequence
  Description of Artificial Sequence: Synthetic probe
tctgcaaaattttctcaagaaggag

SEQ ID NO: 1095 - DNA, 25 bp, Artificial Sequence
  Description of Artificial Sequence: Synthetic probe
ctgcaaaattttctcaagaaggaga

SEQ ID NO: 1096 - DNA, 25 bp, Artificial Sequence
  Description of Artificial Sequence: Synthetic probe
tagaacacatcatggaggacctgga

SEQ ID NO: 1097 - DNA, 25 bp, Artificial Sequence
  Description of Artificial Sequence: Synthetic probe
ggacctggacacaaatgcagacaag

SEQ ID NO: 1098 - DNA, 25 bp, Artificial Sequence
  Description of Artificial Sequence: Synthetic probe
ctcccacgagaagatgcacgagggt

SEQ ID NO: 1099 - DNA, 25 bp, Artificial Sequence
  Description of Artificial Sequence: Synthetic probe
ccacgagaagatgcacgagggtgac

SEQ ID NO: 1100 - DNA, 25 bp, Artificial Sequence
  Description of Artificial Sequence: Synthetic probe
ccaccataagccaggcctcggggag

SEQ ID NO: 1101 - DNA, 25 bp, Artificial Sequence
  Description of Artificial Sequence: Synthetic probe
ctaagaccacagtggccaagatcac

SEQ ID NO: 1102 - DNA, 25 bp, Artificial Sequence
  Description of Artificial Sequence: Synthetic probe
acggccacagccactaatcaggagg

SEQ ID NO: 1103 - DNA, 25 bp, Artificial Sequence
  Description of Artificial Sequence: Synthetic probe
gccactaatcaggaggccaggccac

SEQ ID NO: 1104 - DNA, 25 bp, Artificial Sequence
  Description of Artificial Sequence: Synthetic probe
gccccggggcctgttatgtcaaact

SEQ ID NO: 1105 - DNA, 25 bp, Artificial Sequence
  Description of Artificial Sequence: Synthetic probe
gtcaaactgtcttggctgtggggct

SEQ ID NO: 1106 - DNA, 247 bp, Homo sapiens
  modified_base (111)..(111): a, c, g, t, unknown or other
  modified_base (199)..(213): a, c, g, t, unknown or other
gaagcacatcatgtccagctaaacctcgtgcccaggaagcccagggaaggctgtgcagggacgtctcatctcccatgtgtgatgctgacaccagcggcctggagtcgtggnaaggaggggagccttaccaagactcctgcaaaaacccttggacctctccacgtggttgccgtctctggcccctctcaggctgtgcttnnnnnnnnnnnnnnntctgtccccaccccatgggcctcatgaataaatg

SEQ ID NO: 1107 - DNA, 25 bp, Artificial Sequence
  Description of Artificial Sequence: Synthetic probe
gaagcacatcatgtccagctaaacc

SEQ ID NO: 1108 - DNA, 25 bp, Artificial Sequence
  Description of Artificial Sequence: Synthetic probe
gcacatcatgtccagctaaacctcg

SEQ ID NO: 1109 - DNA, 25 bp, Artificial Sequence
  Description of Artificial Sequence: Synthetic probe
atcatgtccagctaaacctcgtgcc

SEQ ID NO: 1110 - DNA, 25 bp, Artificial Sequence
  Description of Artificial Sequence: Synthetic probe
atgtccagctaaacctcgtgcccag

SEQ ID NO: 1111 - DNA, 25 bp, Artificial Sequence
  Description of Artificial Sequence: Synthetic probe
ccagctaaacctcgtgcccaggaag

SEQ ID NO: 1112 - DNA, 25 bp, Artificial Sequence
  Description of Artificial Sequence: Synthetic probe
aacctcgtgcccaggaagcccaggg

SEQ ID NO: 1113 - DNA, 25 bp, Artificial Sequence
  Description of Artificial Sequence: Synthetic probe
ctcgtgcccaggaagcccagggaag

SEQ ID NO: 1114 - DNA, 25 bp, Artificial Sequence
  Description of Artificial Sequence: Synthetic probe
ggctgtgcagggacgtctcatctcc

SEQ ID NO: 1115 - DNA, 25 bp, Artificial Sequence
  Description of Artificial Sequence: Synthetic probe
tgcagggacgtctcatctcccatgt

SEQ ID NO: 1116 - DNA, 25 bp, Artificial Sequence
  Description of Artificial Sequence: Synthetic probe
aggggagccttaccaagactcctgc

SEQ ID NO: 1117 - DNA, 25 bp, Artificial Sequence
  Description of Artificial Sequence: Synthetic probe
ggagccttaccaagactcctgcaaa

SEQ ID NO: 1118 - DNA, 25 bp, Artificial Sequence
  Description of Artificial Sequence: Synthetic probe
gagccttaccaagactcctgcaaaa

SEQ ID NO: 1119 - DNA, 25 bp, Artificial Sequence
  Description of Artificial Sequence: Synthetic probe
ccaagactcctgcaaaaacccttgg

SEQ ID NO: 1120 - DNA, 25 bp, Artificial Sequence
  Description of Artificial Sequence: Synthetic probe
caagactcctgcaaaaacccttgga

SEQ ID NO: 1121 - DNA, 25 bp, Artificial Sequence
  Description of Artificial Sequence: Synthetic probe
gactcctgcaaaaacccttggacct

SEQ ID NO: 1122 - DNA, 25 bp, Artificial Sequence
  Description of Artificial Sequence: Synthetic probe
accccatgggcctcatgaataaatg

SEQ ID NO: 1123 - DNA, 594 bp, Homo sapiens
  modified_base (26)..(26): a, c, g, t, unknown or other
  modified_base (41)..(58): a, c, g, t, unknown or other
  modified_base (86)..(86): a, c, g, t, unknown or other
  modified_base (129)..(129): a, c, g, t, unknown or other
  modified_base (145)..(145): a, c, g, t, unknown or other
  modified_base (199)..(199): a, c, g, t, unknown or other
  modified_base (210)..(210): a, c, g, t, unknown or other
  modified_base (213)..(213): a, c, g, t, unknown or other
  modified_base (222)..(222): a, c, g, t, unknown or other
  modified_base (234)..(234): a, c, g, t, unknown or other
  modified_base (245)..(245): a, c, g, t, unknown or other
  modified_base (266)..(266): a, c, g, t, unknown or other
  modified_base (273)..(273): a, c, g, t, unknown or other
  modified_base (284)..(285): a, c, g, t, unknown or other
  modified_base (290)..(290): a, c, g, t, unknown or other
  modified_base (298)..(298): a, c, g, t, unknown or other
  modified_base (305)..(305): a, c, g, t, unknown or other
  modified_base (311)..(311): a, c, g, t, unknown or other
  modified_base (316)..(316): a, c, g, t, unknown or other
  modified_base (324)..(325): a, c, g, t, unknown or other
  modified_base (329)..(348): a, c, g, t, unknown or other
  modified_base (367)..(494): a, c, g, t, unknown or other
  modified_base (510)..(510): a, c, g, t, unknown or other
cttctctcctgtcaacagtggccagnccccccaactatgannnnnnnnnnnnnnnnnncacgaggtggctgtgctgggggcgcccncacaaccctgctcccccgacgtccaccgtgatccacatccgcnagcgagacctccgtgncccgaccatgtcgtctggtccctgttcaacaccctcttcatgaacccctgctgncctgggcttcnatnagcattcgncctactccgtgnaagtctagggnacaggaagatggttggcgacngtgaccnggggcccaggnncctantgcctccnaccgccnaagtgncctgnaacatctnngggnnnnnnnnnnnnnnnnnnnntcctcatgaccattccatnnnnnnnnnnnnnnnnnnnnnnnnnnnnnnnnnnnnnnnnnnnnnnnnnnnnnnnnnnnnnnnnnnnnnnnnnnnnnnnnnnnnnnnnnnnnnnnnnnnnnnnnnnnnnnnnnnnnnnnnnnnnnnnnccattcctcgccctgncccccggagccgagtcctgtatcagccctttatcctcacacgcttttctacaatggcattcaataaagtgcacgtgtttctggt

SEQ ID NO: 1124 - DNA, 25 bp, Artificial Sequence
  Description of Artificial Sequence: Synthetic probe
cttctctcctgtcaacagtggccag

SEQ ID NO: 1125 - DNA, 25 bp, Artificial Sequence
  Description of Artificial Sequence: Synthetic probe
ccgaccatgtcgtctggtccctgtt

SEQ ID NO: 1126 - DNA, 25 bp, Artificial Sequence
  Description of Artificial Sequence: Synthetic probe
gaccatgtcgtctggtccctgttca

SEQ ID NO: 1127 - DNA, 25 bp, Artificial Sequence
  Description of Artificial Sequence: Synthetic probe
ccatgtcgtctggtccctgttcaac

SEQ ID NO: 1128 - DNA, 25 bp, Artificial Sequence
  Description of Artificial Sequence: Synthetic probe
catgtcgtctggtccctgttcaaca

SEQ ID NO: 1129 - DNA, 25 bp, Artificial Sequence
  Description of Artificial Sequence: Synthetic probe
cggagccgagtcctgtatcagccct

SEQ ID NO: 1130 - DNA, 25 bp, Artificial Sequence
  Description of Artificial Sequence: Synthetic probe
gagccgagtcctgtatcagcccttt

SEQ ID NO: 1131 - DNA, 25 bp, Artificial Sequence
  Description of Artificial Sequence: Synthetic probe
gccgagtcctgtatcagccctttat

SEQ ID NO: 1132 - DNA, 25 bp, Artificial Sequence
  Description of Artificial Sequence: Synthetic probe
ccgagtcctgtatcagccctttatc

SEQ ID NO: 1133 - DNA, 25 bp, Artificial Sequence
  Description of Artificial Sequence: Synthetic probe
gagtcctgtatcagccctttatcct

SEQ ID NO: 1134 - DNA, 25 bp, Artificial Sequence
  Description of Artificial Sequence: Synthetic probe
ttctacaatggcattcaataaagtg

SEQ ID NO: 1135 - DNA, 25 bp, Artificial Sequence
  Description of Artificial Sequence: Synthetic probe
ctacaatggcattcaataaagtgca

SEQ ID NO: 1136 - DNA, 25 bp, Artificial Sequence
  Description of Artificial Sequence: Synthetic probe
tacaatggcattcaataaagtgcac

SEQ ID NO: 1137 - DNA, 25 bp, Artificial Sequence
  Description of Artificial Sequence: Synthetic probe
caatggcattcaataaagtgcacgt

SEQ ID NO: 1138 - DNA, 25 bp, Artificial Sequence
  Description of Artificial Sequence: Synthetic probe
attcaataaagtgcacgtgtttctg

SEQ ID NO: 1139 - DNA, 25 bp, Artificial Sequence
  Description of Artificial Sequence: Synthetic probe
tcaataaagtgcacgtgtttctggt

SEQ ID NO: 1140 - DNA, 180 bp, Homo sapiens
gggcctagcagtcttcacctctgagtcaggctaggggcctccccttctcatcctccccacccccccgccaaggttctcacactggcctgggcttgggtgcccatataggaggtctgtatgttcaccaacagtgcggaggggtcacacattgcaaaacactgcccagaacagtaaaaagag

SEQ ID NO: 1141 - DNA, 25 bp, Artificial Sequence
  Description of Artificial Sequence: Synthetic probe
gggcctagcagtcttcacctctgag

SEQ ID NO: 1142 - DNA, 25 bp, Artificial Sequence
  Description of Artificial Sequence: Synthetic probe
agcagtcttcacctctgagtcaggc

SEQ ID NO: 1143 - DNA, 25 bp, Artificial Sequence
  Description of Artificial Sequence: Synthetic probe
tcttcacctctgagtcaggctaggg

SEQ ID NO: 1144 - DNA, 25 bp, Artificial Sequence
  Description of Artificial Sequence: Synthetic probe
cacctctgagtcaggctaggggcct

SEQ ID NO: 1145 - DNA, 25 bp, Artificial Sequence
  Description of Artificial Sequence: Synthetic probe
ccgccaaggttctcacactggcctg

SEQ ID NO: 1146 - DNA, 25 bp, Artificial Sequence
  Description of Artificial Sequence: Synthetic probe
tcacactggcctgggcttgggtgcc

SEQ ID NO: 1147 - DNA, 25 bp, Artificial Sequence
  Description of Artificial Sequence: Synthetic probe
actggcctgggcttgggtgcccata

SEQ ID NO: 1148 - DNA, 25 bp, Artificial Sequence
  Description of Artificial Sequence: Synthetic probe
gcttgggtgcccatataggaggtct

SEQ ID NO: 1149 - DNA, 25 bp, Artificial Sequence
  Description of Artificial Sequence: Synthetic probe
gggtgcccatataggaggtctgtat

SEQ ID NO: 1150 - DNA, 25 bp, Artificial Sequence
  Description of Artificial Sequence: Synthetic probe
gcccatataggaggtctgtatgttc

SEQ ID NO: 1151 - DNA, 25 bp, Artificial Sequence
  Description of Artificial Sequence: Synthetic probe
atataggaggtctgtatgttcacca

SEQ ID NO: 1152 - DNA, 25 bp, Artificial Sequence
  Description of Artificial Sequence: Synthetic probe
gtctgtatgttcaccaacagtgcgg

SEQ ID NO: 1153 - DNA, 25 bp, Artificial Sequence
  Description of Artificial Sequence: Synthetic probe
gaggggtcacacattgcaaaacact

SEQ ID NO: 1154 - DNA, 25 bp, Artificial Sequence
  Description of Artificial Sequence: Synthetic probe
acacattgcaaaacactgcccagaa

SEQ ID NO: 1155 - DNA, 25 bp, Artificial Sequence
  Description of Artificial Sequence: Synthetic probe
attgcaaaacactgcccagaacagt

SEQ ID NO: 1156 - DNA, 25 bp, Artificial Sequence
  Description of Artificial Sequence: Synthetic probe
acactgcccagaacagtaaaaagag

SEQ ID NO: 1157 - DNA, 421 bp, Homo sapiens
  modified_base (120)..(121): a, c, g, t, unknown or other
  modified_base (264)..(265): a, c, g, t, unknown or other
  modified_base (374)..(375): a, c, g, t, unknown or other
actctgagcaagtcccagatatactacaactcaatgcaatctttaacatgttgaataccaagaactgcccaagtttgaaggacaaaccgaaggtgatcatcatccaggcctgccgtggtnncagccctggtgtggtgtggtttaaagattcagtaggagtttctggaaacctatctttaccaactacagaagagtttgaggatgatgctattaagaaagcccacatagagaaggattttatcgctttctgctcttccacaccanntaatgtttcttggagacatcccacaatgggctctgtttttattggaagactcattgaacatatgcaagaatatgcctgttcctgtgatgtggaggaaattttccgcaannttcgattttcatttgagcagccagatggtagagcgcagatgcccac

SEQ ID NO: 1158 - DNA, 25 bp, Artificial Sequence
  Description of Artificial Sequence: Synthetic probe
actctgagcaagtcccagatatact

SEQ ID NO: 1159 - DNA, 25 bp, Artificial Sequence
  Description of Artificial Sequence: Synthetic probe
caagtcccagatatactacaactca

SEQ ID NO: 1160 - DNA, 25 bp, Artificial Sequence
  Description of Artificial Sequence: Synthetic probe
gatatactacaactcaatgcaatct

SEQ ID NO: 1161 - DNA, 25 bp, Artificial Sequence
  Description of Artificial Sequence: Synthetic probe
aactcaatgcaatctttaacatgtt

SEQ ID NO: 1162 - DNA, 25 bp, Artificial Sequence
  Description of Artificial Sequence: Synthetic probe
gcaatctttaacatgttgaatacca

SEQ ID NO: 1163 - DNA, 25 bp, Artificial Sequence
  Description of Artificial Sequence: Synthetic probe
tgaataccaagaactgcccaagttt

SEQ ID NO: 1164 - DNA, 25 bp, Artificial Sequence
  Description of Artificial Sequence: Synthetic probe
tctggaaacctatctttaccaacta

SEQ ID NO: 1165 - DNA, 25 bp, Artificial Sequence
  Description of Artificial Sequence: Synthetic probe
tctttaccaactacagaagagtttg

SEQ ID NO: 1166 - DNA, 25 bp, Artificial Sequence
  Description of Artificial Sequence: Synthetic probe
gaaagcccacatagagaaggatttt

SEQ ID NO: 1167 - DNA, 25 bp, Artificial Sequence
  Description of Artificial Sequence: Synthetic probe
gtttcttggagacatcccacaatgg

SEQ ID NO: 1168 - DNA, 25 bp, Artificial Sequence
  Description of Artificial Sequence: Synthetic probe
gagacatcccacaatgggctctgtt

SEQ ID NO: 1169 - DNA, 25 bp, Artificial Sequence
  Description of Artificial Sequence: Synthetic probe
caagaatatgcctgttcctgtgatg

SEQ ID NO: 1170 - DNA, 25 bp, Artificial Sequence
  Description of Artificial Sequence: Synthetic probe
gcctgttcctgtgatgtggaggaaa

SEQ ID NO: 1171 - DNA, 25 bp, Artificial Sequence
  Description of Artificial Sequence: Synthetic probe
cgattttcatttgagcagccagatg

SEQ ID NO: 1172 - DNA, 25 bp, Artificial Sequence
  Description of Artificial Sequence: Synthetic probe
tttgagcagccagatggtagagcgc

SEQ ID NO: 1173 - DNA, 25 bp, Artificial Sequence
  Description of Artificial Sequence: Synthetic probe
cagatggtagagcgcagatgcccac

SEQ ID NO: 1174 - DNA, 535 bp, Homo sapiens
ttccccaaagccagaagatgcacaaggaggaacatgaggtggctgtgctgggggcaccccccagcaccatccttccaaggtccaccgtgatcaacatccacagcgagacctccgtgcccgaccatgtcgtctggtccctgttcaacaccctcttcttgaactggtgctgtctgggcttcatagcattcgcctactccgtgaagtctagggacaggaagatggttggcgacgtgaccggggcccaggcctatgcctccaccgccaagtgcctgaacatctgggccctgattctgggcatcctcatgaccattggattcatcctgtcactggtattcggctctgtgacagtctaccatattatgttacagataatacaggaaaaacggggttactagtagccgcccatagcctgcaacctttgcactccactgtgcaatgctggccctgcacgctggggctgttgcccctgcccccttggtcctgcccctagatacagcagtttatacccacacacctgtctacagtgtcattcaat

SEQ ID NO: 1175 - DNA, 25 bp, Artificial Sequence
  Description of Artificial Sequence: Synthetic probe
ttccccaaagccagaagatgcacaa

SEQ ID NO: 1176 - DNA, 25 bp, Artificial Sequence
  Description of Artificial Sequence: Synthetic probe
tcttcttgaactggtgctgtctggg

SEQ ID NO: 1177 - DNA, 25 bp, Artificial Sequence
  Description of Artificial Sequence: Synthetic probe
gattcatcctgtcactggtattcgg

SEQ ID NO: 1178 - DNA, 25 bp, Artificial Sequence
  Description of Artificial Sequence: Synthetic probe
tcctgtcactggtattcggctctgt

SEQ ID NO: 1179 - DNA, 25 bp, Artificial Sequence
  Description of Artificial Sequence: Synthetic probe
tattcggctctgtgacagtctacca

SEQ ID NO: 1180 - DNA, 25 bp, Artificial Sequence
  Description of Artificial Sequence: Synthetic probe
tgacagtctaccatattatgttaca

SEQ ID NO: 1181 - DNA, 25 bp, Artificial Sequence
  Description of Artificial Sequence: Synthetic probe
tctaccatattatgttacagataat

SEQ ID NO: 1182 - DNA, 25 bp, Artificial Sequence
  Description of Artificial Sequence: Synthetic probe
cctgcaacctttgcactccactgtg

SEQ ID NO: 1183 - DNA, 25 bp, Artificial Sequence
  Description of Artificial Sequence: Synthetic probe
acctttgcactccactgtgcaatgc

SEQ ID NO: 1184 - DNA, 25 bp, Artificial Sequence
  Description of Artificial Sequence: Synthetic probe
gcactccactgtgcaatgctggccc

SEQ ID NO: 1185 - DNA, 25 bp, Artificial Sequence
  Description of Artificial Sequence: Synthetic probe
ctggccctgcacgctggggctgttg

SEQ ID NO: 1186 - DNA, 25 bp, Artificial Sequence
  Description of Artificial Sequence: Synthetic probe
ctgcccctagatacagcagtttata

SEQ ID NO: 1187 - DNA, 25 bp, Artificial Sequence
  Description of Artificial Sequence: Synthetic probe
acagcagtttatacccacacacctg

SEQ ID NO: 1188 - DNA, 25 bp, Artificial Sequence
  Description of Artificial Sequence: Synthetic probe
gtttatacccacacacctgtctaca

SEQ ID NO: 1189 - DNA, 25 bp, Artificial Sequence
  Description of Artificial Sequence: Synthetic probe
acccacacacctgtctacagtgtca

SEQ ID NO: 1190 - DNA, 25 bp, Artificial Sequence
  Description of Artificial Sequence: Synthetic probe
acacctgtctacagtgtcattcaat

SEQ ID NO: 1191 - DNA, 415 bp, Homo sapiens
gttcggatttgactgcctgtatatgttttgtgaaatggtcctgtttttgggtaggtgacacgtggactctagtatgtaaatgttacttgaatctgtgcttcataatagtgtgtggcatgtatgtgcagactcttggatgctttatgcctgcgcaccaggagccctgtcctcacgttcccaggagggcggcttcacccttcgtaaccaggagacaaggcggccatggatttgcccttgattctattttgctaatggaagatagaaaggagagaaggtttttttttttttttaacattctgaagatggtgctgtgtcaagaaggaccttttttttcccctctcccctattttttaagtaccttggaggaggagaggttggtgacatgcatggtggggatctatggcctctggtgctt

SEQ ID NO: 1192 - DNA, 25 bp, Artificial Sequence
  Description of Artificial Sequence: Synthetic probe
gttcggatttgactgcctgtatatg

SEQ ID NO: 1193 - DNA, 25 bp, Artificial Sequence
  Description of Artificial Sequence: Synthetic probe
gtgacacgtggactctagtatgtaa

SEQ ID NO: 1194 - DNA, 25 bp, Artificial Sequence
  Description of Artificial Sequence: Synthetic probe
aatgttacttgaatctgtgcttcat

SEQ ID NO: 1195 - DNA, 25 bp, Artificial Sequence
  Description of Artificial Sequence: Synthetic probe
acttgaatctgtgcttcataatagt

SEQ ID NO: 1196 - DNA, 25 bp, Artificial Sequence
  Description of Artificial Sequence: Synthetic probe
gcttcataatagtgtgtggcatgta

SEQ ID NO: 1197 - DNA, 25 bp, Artificial Sequence
  Description of Artificial Sequence: Synthetic probe
tgtgtggcatgtatgtgcagactct

SEQ ID NO: 1198 - DNA, 25 bp, Artificial Sequence
  Description of Artificial Sequence: Synthetic probe
gcatgtatgtgcagactcttggatg

SEQ ID NO: 1199 - DNA, 25 bp, Artificial Sequence
  Description of Artificial Sequence: Synthetic probe
atgtgcagactcttggatgctttat

SEQ ID NO: 1200 - DNA, 25 bp, Artificial Sequence
  Description of Artificial Sequence: Synthetic probe
agactcttggatgctttatgcctgc

SEQ ID NO: 1201 - DNA, 25 bp, Artificial Sequence
  Description of Artificial Sequence: Synthetic probe
tcgtaaccaggagacaaggcggcca

SEQ ID NO: 1202 - DNA, 25 bp, Artificial Sequence
  Description of Artificial Sequence: Synthetic probe
gacaaggcggccatggatttgccct

SEQ ID NO: 1203 - DNA, 25 bp, Artificial Sequence
  Description of Artificial Sequence: Synthetic probe
gcggccatggatttgcccttgattc

SEQ ID NO: 1204 - DNA, 25 bp, Artificial Sequence
  Description of Artificial Sequence: Synthetic probe
ttaacattctgaagatggtgctgtg

SEQ ID NO: 1205 - DNA, 25 bp, Artificial Sequence
  Description of Artificial Sequence: Synthetic probe
ttctgaagatggtgctgtgtcaaga

SEQ ID NO: 1206 - DNA, 25 bp, Artificial Sequence
  Description of Artificial Sequence: Synthetic probe
agatggtgctgtgtcaagaaggacc

SEQ ID NO: 1207 - DNA, 25 bp, Artificial Sequence
  Description of Artificial Sequence: Synthetic probe
tggggatctatggcctctggtgctt

SEQ ID NO: 1208 - DNA, 415 bp, Homo sapiens
ataactgttttcacttcctatcagaaggcctgcttgaagacataaaggaataatgatacattaaaattcttactagatagatatattccttcctcccaggagtattagactagctaatagtaaaggcctcaacgttattctttacttcatgttgaaaacaattactacagatatttcatccacctcagtatttatcaaggaaatggaaaatgatacagctataaaagaaagctgttatttactgtagttgtagatgtattcactacagaatcctacatttttcagcaggccacagtccagccaaatcctataatatccttgaaaagaaactattaaaaaggatagacatttctgatgtaagtaaaacccccaagcaacttaatatccatctgtcagtcatcaacttttcccctag

SEQ ID NO: 1209 - DNA, 25 bp, Artificial Sequence
  Description of Artificial Sequence: Synthetic probe
ataactgttttcacttcctatcaga

SEQ ID NO: 1210 - DNA, 25 bp, Artificial Sequence
  Description of Artificial Sequence: Synthetic probe
acttcctatcagaaggcctgcttga

SEQ ID NO: 1211 - DNA, 25 bp, Artificial Sequence
  Description of Artificial Sequence: Synthetic probe
tcctcccaggagtattagactagct

SEQ ID NO: 1212 - DNA, 25 bp, Artificial Sequence
  Description of Artificial Sequence: Synthetic probe
tactacagatatttcatccacctca

SEQ ID NO: 1213 - DNA, 25 bp, Artificial Sequence
  Description of Artificial Sequence: Synthetic probe
agatatttcatccacctcagtattt

SEQ ID NO: 1214 - DNA, 25 bp, Artificial Sequence
  Description of Artificial Sequence: Synthetic probe
ttcatccacctcagtatttatcaag

SEQ ID NO: 1215 - DNA, 25 bp, Artificial Sequence
  Description of Artificial Sequence: Synthetic probe
cacctcagtatttatcaaggaaatg

SEQ ID NO: 1216 - DNA, 25 bp, Artificial Sequence
  Description of Artificial Sequence: Synthetic probe
gatgtattcactacagaatcctaca

SEQ ID NO: 1217 - DNA, 25 bp, Artificial Sequence
  Description of Artificial Sequence: Synthetic probe
ttcactacagaatcctacatttttc

SEQ ID NO: 1218 - DNA, 25 bp, Artificial Sequence
  Description of Artificial Sequence: Synthetic probe
acagaatcctacatttttcagcagg

SEQ ID NO: 1219 - DNA, 25 bp, Artificial Sequence
  Description of Artificial Sequence: Synthetic probe
tcctacatttttcagcaggccacag

SEQ ID NO: 1220 - DNA, 25 bp, Artificial Sequence
  Description of Artificial Sequence: Synthetic probe
cagcaggccacagtccagccaaatc

SEQ ID NO: 1221 - DNA, 25 bp, Artificial Sequence
  Description of Artificial Sequence: Synthetic probe
gtccagccaaatcctataatatcct

SEQ ID NO: 1222 - DNA, 25 bp, Artificial Sequence
  Description of Artificial Sequence: Synthetic probe
agcaacttaatatccatctgtcagt

SEQ ID NO: 1223 - DNA, 25 bp, Artificial Sequence
  Description of Artificial Sequence: Synthetic probe
tccatctgtcagtcatcaacttttc

SEQ ID NO: 1224 - DNA, 25 bp, Artificial Sequence
  Description of Artificial Sequence: Synthetic probe
tgtcagtcatcaacttttcccctag

SEQ ID NO: 1225 - DNA, 538 bp, Homo sapiens
tcttgacaaaacctaacttgcgcagaaaacaagatgagattggcatggctttatttgttttttttgttttgttttggttttttttttttttttggcttgactcaggatttaaaaactggaacggtgaaggtgacagcagtcggttggagcgagcatcccccaaagttcacaatgtggccgaggactttgattgcacattgttgtttttttaatagtcattccaaatatgagatgcattgttacaggaagtcccttgccatcctaaaagccaccccacttctctctaaggagaatggcccagtcctctcccaagtccacacaggggaggtgatagcattgctttcgtgtaaattatgtaatgcaaaatttttttaatcttcgccttaatacttttttattttgttttattttgaatgatgagccttcgtgcccccccttccccctttttgtcccccaacttgagatgtatgaaggcttttggtctccctgggagtgggtggaggcagccagggcttacctgtacactgacttgagacca

SEQ ID NO: 1226 - DNA, 25 bp, Artificial Sequence
  Description of Artificial Sequence: Synthetic probe
ctgcgcaagttaggttttgtcaaga

SEQ ID NO: 1227 - DNA, 25 bp, Artificial Sequence
  Description of Artificial Sequence: Synthetic probe
acaaataaagccatgccaatctcat

SEQ ID NO: 1228 - DNA, 25 bp, Artificial Sequence
  Description of Artificial Sequence: Synthetic probe
ggggatgctcgctccaaccgactgc

SEQ ID NO: 1229 - DNA, 25 bp, Artificial Sequence
  Description of Artificial Sequence: Synthetic probe
tcctcggccacattgtgaactttgg

SEQ ID NO: 1230 - DNA, 25 bp, Artificial Sequence
  Description of Artificial Sequence: Synthetic probe
aagtcctcggccacattgtgaactt

SEQ ID NO: 1231 - DNA, 25 bp, Artificial Sequence
  Description of Artificial Sequence: Synthetic probe
gtgcaatcaaagtcctcggccacat

SEQ ID NO: 1232 - DNA, 25 bp, Artificial Sequence
  Description of Artificial Sequence: Synthetic probe
aacaatgtgcaatcaaagtcctcgg

SEQ ID NO: 1233 - DNA, 25 bp, Artificial Sequence
  Description of Artificial Sequence: Synthetic probe
tctcatatttggaatgactattaaa

SEQ ID NO: 1234 - DNA, 25 bp, Artificial Sequence
  Description of Artificial Sequence: Synthetic probe
aatgcatctcatatttggaatgact

SEQ ID NO: 1235 - DNA, 25 bp, Artificial Sequence
  Description of Artificial Sequence: Synthetic probe
ggatggcaagggacttcctgtaaca

SEQ ID NO: 1236 - DNA, 25 bp, Artificial Sequence
  Description of Artificial Sequence: Synthetic probe
ttaggatggcaagggacttcctgta

SEQ ID NO: 1237 - DNA, 25 bp, Artificial Sequence
  Description of Artificial Sequence: Synthetic probe
gggtggcttttaggatggcaaggga

SEQ ID NO: 1238 - DNA, 25 bp, Artificial Sequence
  Description of Artificial Sequence: Synthetic probe
ctgggccattctccttagagagaag

SEQ ID NO: 1239 - DNA, 25 bp, Artificial Sequence
  Description of Artificial Sequence: Synthetic probe
tacacgaaagcaatgctatcacctc

SEQ ID NO: 1240 - DNA, 25 bp, Artificial Sequence
  Description of Artificial Sequence: Synthetic probe
gcacgaaggctcatcattcaaaata

SEQ ID NO: 1241 - DNA, 25 bp, Artificial Sequence
  Description of Artificial Sequence: Synthetic probe
ggggcacgaaggctcatcattcaaa

SEQ ID NO: 1242 - DNA, 25 bp, Artificial Sequence
  Description of Artificial Sequence: Synthetic probe
ccagggagaccaaaagccttcatac

SEQ ID NO: 1243 - DNA, 25 bp, Artificial Sequence
  Description of Artificial Sequence: Synthetic probe
caggtaagccctggctgcctccacc

SEQ ID NO: 1244 - DNA, 25 bp, Artificial Sequence
  Description of Artificial Sequence: Synthetic probe
caagtcagtgtacaggtaagccctg

SEQ ID NO: 1245 - DNA, 25 bp, Artificial Sequence
  Description of Artificial Sequence: Synthetic probe
tggtctcaagtcagtgtacaggtaa

SEQ ID NO: 1246 - DNA, 1449 bp, Homo sapiens
ctggatagaacagctcaagccttgccacttcgggcttctcactgcagctgggcttggacttcggagttttgccattgccagtgggacgtctgagactttctccttcaagtacttggcagatcactctcttagcagggtctgcgcttcgcagccgggatgaagctggtttccgtcgccctgatgtacctgggttcgctcgccttcctaggcgctgacaccgctcggttggatgtcgcgtcggagtttcgaaagaagtggaataagtgggctctgagtcgtgggaagagggaactgcggatgtccagcagctaccccaccgggctcgctgacgtgaaggccgggcctgcccagacccttattcggccccaggacatgaagggtgcctctcgaagccccgaagacagcagtccggatgccgcccgcatccgagtcaagcgctaccgccagagcatgaacaacttccagggcctccggagctttggctgccgcttcgggacgtgcacggtgcagaagctggcacaccagatctaccagttcacagataaggacaaggacaacgtcgcccccaggagcaagatcagcccccagggctacggccgccggcgccggcgctccctgcccgaggccggcccgggtcggactctggtgtcttctaagccacaagcacacggggctccagcccccccgagtggaagtgctccccactttctttaggatttaggcgcccatggtacaaggaatagtcgcgcaagcatcccgctggtgcctcccgggacgaaggacttcccgagcggtgtggggaccgggctctgacagccctgcggagaccctgagtccgggaggcaccgtccggcggcgagctctggctttgcaagggcccctccttctgggggcttcgcttccttagccttgctcaggtgcaagtgccccagggggcggggtgcagaagaatccgagtgtttgccaggcttaaggagaggagaaactgagaaatgaatgctgagacccccggagcaggggtctgagccacagccgtgctcgcccacaaactgatttctcacggcgtgtcaccccaccagggcgcaagcctcactattacttgaactttccaaaacctaaagaggaaaagtgcaatgcgtgttgtacatacagaggtaactatcaatatttaagtttgttgctgtcaagattttttttgtaacttcaaatatagagatatttttgtacgttatatattgtattaagggcattttaaaagcaattatattgtcctcccctattttaagacgtgaatgtctcagcgaggtgtaaagttgttcgccgcgtggaatgtgagtgtgtttgtgtgcatgaaagagaaagactgattacctcctgtgtggaagaaggaaacaccgagtctctgtataatctatttacataaaatgggtgatatgcgaacagcaaacc

SEQ ID NO: 1247 - DNA, 438 bp, Homo sapiens
agcccagtaggtggggccttgctgccatctgccatatgacccttccagtcccaggcttctgaagagacgtggtaagtgcggtgcagttttcaactgacctctggacgcagaacttcagccatgaaggtaacaggcatctttcttctcagtgccttggccctgttgagtctatctggtaacactggagctgactccctgggaagagaggccaaatgttacaatgaacttaatggatgcaccaagatatatgaccctgtctgtgggactgatggaaatacttatcccaatgaatgcgtgttatgttttgaaaatcggaaacgccagacttctatcctcattcaaaaatctgggccttgctgagaaccaaggttttgaaatcccatcaggtcaccgcgaggcctgactggccttattgttgaataaatgtatctgaatatc

SEQ ID NO: 1248 - DNA, 1607 bp, Homo sapiens
aatgactcctttcggtaagtgcagtggaagctgtacactgcccaggcaaagcgtccgggcagcgtaggcgggcgactcagatcccagccagtggacttagcccctgtttgctcctccgataactggggtgaccttggttaatattcaccagcagcctcccccgttgcccctctggatccactgcttaaatacggacgaggacagggccctgtctcctcagcttcaggcaccaccactgacctgggacagtgaatcgacaatgccgtcttctgtctcgtggggcatcctcctgctggcaggcctgtgctgcctggtccctgtctccctggctgaggatccccagggagatgctgcccagaagacagatacatcccaccatgatcaggatcacccaaccttcaacaagatcacccccaacctggctgagttcgccttcagcctataccgccagctggcacaccagtccaacagcaccaatatcttcttctccccagtgagcatcgctacagcctttgcaatgctctccctggggaccaaggctgacactcacgatgaaatcctggagggcctgaatttcaacctcacggagattccggaggctcagatccatgaaggcttccaggaactcctccgtaccctcaaccagccagacagccagctccagctgaccaccggcaatggcctgttcctcagcgagggcctgaagctagtggataagtttttggaggatgttaaaaagttgtaccactcagaagccttcactgtcaacttcggggacaccgaagaggccaagaaacagatcaacgattacgtggagaagggtactcaagggaaaattgtggatttggtcaaggagcttgacagagacacagtttttgctctggtgaattacatcttctttaaaggcaaatgggagagaccctttgaagtcaaggacaccgaggaagaggacttccacgtggaccaggtgaccaccgtgaaggtgcctatgatgaagcgtttaggcatgtttaacatccagcactgtaagaagctgtccagctgggtgctgctgatgaaatacctgggcaatgccaccgccatcttcttcctgcctgatgaggggaaactacagcacctggaaaatgaactcacccacgatatcatcaccaagttcctggaaaatgaagacagaaggtctgccagcttacatttacccaaactgtccattactggaacctatgatctgaagagcgtcctgggtcaactgggcatcactaaggtcttcagcaatggggctgacctctccggggtcacagaggaggcacccctgaagctctccaaggccgtgcataaggctgtgctgaccatcgacgagaaagggactgaagctgctggggccatgtttttagaggccatacccatgtctatcccccccgaggtcaagttcaacaaaccctttgtcttcttaatgattgaacaaaataccaagtctcccctcttcatgggaaaagtggtgaatcccacccaaaaataactgcctctcgctcctcaacccctcccctccatccctggccccctccctggatgacattaaagaagggttgagctggtccctgcctgcaaaa

SEQ ID NO: 1249 - DNA, 4157 bp, Homo sapiens
agcggggcggggcgccagcgctgccttttctcctgccgggtagtttcgctttcctgcgcagagtctgcggaggggctcggctgcaccggggggatcgcgcctggcagaccccagaccgagcagaggcgacccagcgcgctcgggagaggctgcaccgccgcgcccccgcctagcccttccggatcctgcgcgcagaaaagtttcatttgctgtatgccatcctcgagagctgtctaggttaacgttcgcactctgtgtatataacctcgacagtcttggcacctaacgtgctgtgcgtagctgctcctttggttgaatccccaggcccttgttggggcacaaggtggcaggatgtctcagtggtacgaacttcagcagcttgactcaaaattcctggagcaggttcaccagctttatgatgacagttttcccatggaaatcagacagtacctggcacagtggttagaaaagcaagactgggagcacgctgccaatgatgtttcatttgccaccatccgttttcatgacctcctgtcacagctggatgatcaatatagtcgcttttctttggagaataacttcttgctacagcataacataaggaaaagcaagcgtaatcttcaggataattttcaggaagacccaatccagatgtctatgatcatttacagctgtctgaaggaagaaaggaaaattctggaaaacgcccagagatttaatcaggctcagtcggggaatattcagagcacagtgatgttagacaaacagaaagagcttgacagtaaagtcagaaatgtgaaggacaaggttatgtgtatagagcatgaaatcaagagcctggaagatttacaagatgaatatgacttcaaatgcaaaaccttgcagaacagagaacacgagaccaatggtgtggcaaagagtgatcagaaacaagaacagctgttactcaagaagatgtatttaatgcttgacaataagagaaaggaagtagttcacaaaataatagagttgctgaatgtcactgaacttacccagaatgccctgattaatgatgaactagtggagtggaagcggagacagcagagcgcctgtattggggggccgcccaatgcttgcttggatcagctgcagaactggttcactatagttgcggagagtctgcagcaagttcggcagcagcttaaaaagttggaggaattggaacagaaatacacctacgaacatgaccctatcacaaaaaacaaacaagtgttatgggaccgcaccttcagtcttttccagcagctcattcagagctcgtttgtggtggaaagacagccctgcatgccaacgcaccctcagaggccgctggtcttgaagacaggggtccagttcactgtgaagttgagactgttggtgaaattgcaagagctgaattataatttgaaagtcaaagtcttatttgataaagatgtgaatgagagaaatacagtaaaaggatttaggaagttcaacattttgggcacgcacacaaaagtgatgaacatggaggagtccaccaatggcagtctggcggctgaatttcggcacctgcaattgaaagaacagaaaaatgctggcaccagaacgaatgagggtcctctcatcgttactgaagagcttcactcccttagttttgaaacccaattgtgccagcctggtttggtaattgacctcgagacgacctctctgcccgttgtggtgatctccaacgtcagccagctcccgagcggttgggcctccatcctttggtacaacatgctggtggcggaacccaggaatctgtccttcttcctgactccaccatgtgcacgatgggctcagctttcagaagtgctgagttggcagttttcttctgtcaccaaaagaggtctcaatgtggaccagctgaacatgttgggagagaagcttcttggtcctaacgccagccccgatggtctcattccgtggacgaggttttgtaaggaaaatataaatgataaaaattttcccttctggctttggattgaaagcatcctagaactcattaaaaaacacctgctccctctctggaatgatgggtgcatcatgggcttcatcagcaaggagcgagagcgtgccctgttgaaggaccagcagccggggaccttcctgctgcggttcagtgagagctcccgggaaggggccatcacattcacatgggtggagcggtcccagaacggaggcgaacctgacttccatgcggttgaaccctacacgaagaaagaactttctgctgttactttccctgacatcattcgcaattacaaagtcatggctgctgagaatattcctgagaatcccctgaagtatctgtatccaaatattgacaaagaccatgcctttggaaagtattactccaggccaaaggaagcaccagagccaatggaacttgatggccctaaaggaactggatatatcaagactgagttgatttctgtgtctgaagttcacccttctagacttcagaccacagacaacctgctccccatgtctcctgaggagtttgacgaggtgtctcggatagtgggctctgtagaattcgacagtatgatgaacacagtatagagcatgaatttttttcatcttctctggcgacagttttccttctcatctgtgattccctcctgctactctgttccttcacatcctgtgtttctagggaaatgaaagaaaggccagcaaattcgctgcaacctgttgatagcaagtgaatttttctctaactcagaaacatcagttactctgaagggcatcatgcatcttactgaaggtaaaattgaaaggcattctctgaagagtgggtttcacaagtgaaaaacatccagatacacccaaagtatcaggacgagaatgagggtcctttgggaaaggagaagttaagcaacatctagcaaatgttatgcataaagtcagtgcccaactgttataggttgttggataaatcagtggttatttagggaactgcttgacgtaggaacggtaaatttctgtgggagaattcttacatgttttctttgctttaagtgtaactggcagttttccattggtttacctgtgaaatagttcaaagccaagtttatatacaattatatcagtcctctttcaaaggtagccatcatggatctggtagggggaaaatgtgtattttattacatctttcacattggctatttaaagacaaagacaaattctgtttcttgagaagagaatattagctttactgtttgttatggcttaatgacactagctaatatcaatagaaggatgtacatttccaaattcacaagttgtgtttgatatccaaagctgaatacattctgctttcatcttggtcacatacaattatttttacagttctcccaagggagttaggctattcacaaccactcattcaaaagttgaaattaaccatagatgtagataaactcagaaatttaattcatgtttcttaaatgggctactttgtcctttttgttattagggtggtatttagtctattagccacaaaattgggaaaggagtagaaaaagcagtaactgacaacttgaataatacaccagagataatatgagaatcagatcatttcaaaactcatttcctatgtaactgcattgagaactgcatatgtttcgctgatatatgtgtttttcacatttgcgaatggttccattctctctcctgtactttttccagacacttttttgagtggatgatgtttcgtgaagtatactgtatttttacctttttccttccttatcactgacacaaaaagtagattaagagatgggtttgacaaggttcttcccttttacatactgctgtctatgtggctgtatcttgtttttccactactgctaccacaactatattatcatgcaaatgctgtattcttctttggtggagataaagatttcttgagttttgttttaaaattaaagctaaagtatctgtattgcattaaatataatatgcacacagtgctttccgtggcactgcatacaatctgaggcctcctctctcagtttttatatagatggcgagaacctaagtttcagttgattttacaattgaaatgactaaaaaacaaagaagacaacattaaaacaatattgtttcta

SEQ ID NO: 1250 - DNA, 4978 bp, Homo sapiens
ggtttccggagctgcggcggcgcagactgggagggggagccgggggttccgacgtcgcagccgagggaacaagccccaaccggatcctggacaggcaccccggcttggcgctgtctctccccctcggctcggagaggcccttcggcctgagggagcctcgccgcccgtccccggcacacgcgcagccccggcctctcggcctctgccggagaaacagttgggacccctgattttagcaggatggcccaatggaatcagctacagcagcttgacacacggtacctggagcagctccatcagctctacagtgacagcttcccaatggagctgcggcagtttctggccccttggattgagagtcaagattgggcatatgcggccagcaaagaatcacatgccactttggtgtttcataatctcctgggagagattgaccagcagtatagccgcttcctgcaagagtcgaatgttctctatcagcacaatctacgaagaatcaagcagtttcttcagagcaggtatcttgagaagccaatggagattgcccggattgtggcccggtgcctgtgggaagaatcacgccttctacagactgcagccactgcggcccagcaagggggccaggccaaccaccccacagcagccgtggtgacggagaagcagcagatgctggagcagcaccttcaggatgtccggaagagagtgcaggatctagaacagaaaatgaaagtggtagagaatctccaggatgactttgatttcaactataaaaccctcaagagtcaaggagacatgcaagatctgaatggaaacaaccagtcagtgaccaggcagaagatgcagcagctggaacagatgctcactgcgctggaccagatgcggagaagcatcgtgagtgagctggcggggcttttgtcagcgatggagtacgtgcagaaaactctcacggacgaggagctggctgactggaagaggcggcaacagattgcctgcattggaggcccgcccaacatctgcctagatcggctagaaaactggataacgtcattagcagaatctcaacttcagacccgtcaacaaattaagaaactggaggagttgcagcaaaaagtttcctacaaaggggaccccattgtacagcaccggccgatgctggaggagagaatcgtggagctgtttagaaacttaatgaaaagtgcctttgtggtggagcggcagccctgcatgcccatgcatcctgaccggcccctcgtcatcaagaccggcgtccagttcactactaaagtcaggttgctggtcaaattccctgagttgaattatcagcttaaaattaaagtgtgcattgacaaagactctggggacgttgcagctctcagaggatcccggaaatttaacattctgggcacaaacacaaaagtgatgaacatggaagaatccaacaacggcagcctctctgcagaattcaaacacttgaccctgagggagcagagatgtgggaatgggggccgagccaattgtgatgcttccctgattgtgactgaggagctgcacctgatcacctttgagaccgaggtgtatcaccaaggcctcaagattgacctagagacccactccttgccagttgtggtgatctccaacatctgtcagatgccaaatgcctgggcgtccatcctgtggtacaacatgctgaccaacaatcccaagaatgtaaacttttttaccaagcccccaattggaacctgggatcaagtggccgaggtcctgagctggcagttctcctccaccaccaagcgaggactgagcatcgagcagctgactacactggcagagaaactcttgggacctggtgtgaattattcagggtgtcagatcacatgggctaaattttgcaaagaaaacatggctggcaagggcttctccttctgggtctggctggacaatatcattgaccttgtgaaaaagtacatcctggccctttggaacgaagggtacatcatgggctttatcagtaaggagcgggagcgggccatcttgagcactaagcctccaggcaccttcctgctaagattcagtgaaagcagcaaagaaggaggcgtcactttcacttgggtggagaaggacatcagcggtaagacccagatccagtccgtggaaccatacacaaagcagcagctgaacaacatgtcatttgctgaaatcatcatgggctataagatcatggatgctaccaatatcctggtgtctccactggtctatctctatcctgacattcccaaggaggaggcattcggaaagtattgtcggccagagagccaggagcatcctgaagctgacccaggtagcgctgccccatacctgaagaccaagtttatctgtgtgacaccaacgacctgcagcaataccattgacctgccgatgtccccccgcactttagattcattgatgcagtttggaaataatggtgaaggtgctgaaccctcagcaggagggcagtttgagtccctcacctttgacatggagttgacctcggagtgcgctacctcccccatgtgaggagctgagaacggaagctgcagaaagatacgactgaggcgcctacctgcattctgccacccctcacacagccaaaccccagatcatctgaaactactaactttgtggttccagattttttttaatctcctacttctgctatctttgagcaatctgggcacttttaaaaatagagaaatgagtgaatgtgggtgatctgcttttatctaaatgcaaataaggatgtgttctctgagacccatgatcaggggatgtggcggggggtggctagagggagaaaaaggaaatgtcttgtgttgttttgttcccctgccctcctttctcagcagctttttgttattgttgttgttgttcttagacaagtgcctcctggtgcctgcggcatccttctgcctgtttctgtaagcaaatgccacaggccacctatagctacatactcctggcattgcactttttaaccttgctgacatccaaatagaagataggactatctaagccctaggtttctttttaaattaagaaataataacaattaaagggcaaaaaacactgtatcagcatagcctttctgtatttaagaaacttaagcagccgggcatggtggctcacgcctgtaatcccagcactttgggaggccgaggcggatcataaggtcaggagatcaagaccatcctggctaacacggtgaaaccccgtctctactaaaagtacaaaaaattagctgggtgtggtggtgggcgcctgtagtcccagctactcgggaggctgaggcaggagaatcgcttgaacctgagaggcggaggttgcagtgagccaaaattgcaccactgcacactgcactccatcctgggcgacagtctgagactctgtctcaaaaaaaaaaaaaaaaaaaagaaacttcagttaacagcctccttggtgctttaagcattcagcttccttcaggctggtaatttatataatccctgaaacgggcttcaggtcaaacccttaagacatctgaagctgcaacctggcctttggtgttgaaataggaaggtttaaggagaatctaagcattttagacttttttttataaatagacttattttcctttgtaatgtattggccttttagtgagtaaggctgggcagagggtgcttacaaccttgactccctttctccctggacttgatctgctgtttcagaggctaggttgtttctgtgggtgccttatcagggctgggatacttctgattctggcttccttcctgccccaccctcccgaccccagtccccctgatcctgctagaggcatgtctccttgcgtgtctaaaggtccctcatcctgtttgttttaggaatcctggtctcaggacctcatggaagaagagggggagagagttacaggttggacatgatgcacactatggggccccagcgacgtgtctggttgagctcagggaatatggttcttagccagtttcttggtgatatccagtggcacttgtaatggcgtcttcattcagttcatgcagggcaaaggcttactgataaacttgagtctgccctcgtatgagggtgtatacctggcctccctctgaggctggtgactcctccctgctggggccccacaggtgaggcagaacagctagagggcctccccgcctgcccgccttggctggctagctcgcctctcctgtgcgtatgggaacacctagcacgtgctggatgggctgcctctgactcagaggcatggccggatttggcaactcaaaaccaccttgcctcagctgatcagagtttctgtggaattctgtttgttaaatcaaattagctggtctctgaattaagggggagacgaccttctctaagatgaacagggttcgccccagtcctcctgcctggagacagttgatgtgtcatgcagagctcttacttctccagcaacactcttcagtacataataagcttaactgataaacagaatatttagaaaggtgagacttgggcttaccattgggtttaaatcatagggacctagggcgagggttcagggcttctctggagcagatattgtcaagttcatggccttaggtagcatgtatctggtcttaactctgattgtagcaaaagttctgagaggagctgagccctgttgtggcccattaaagaacagggtcctcaggccctgcccgcttcctgtccactgccccctccccatccccagcccagccgagggaatcccgtgggttgcttacctacctataaggtggtttataagctgctgtcctggccactgcattcaaattccaatgtgtacttcatagtgtaaaaatttatattattgtgaggttttttgtcttttttttttttttttttttttggtatattgctgtatctactttaacttccagaaataaacgttatataggaaccgtaaaaa

SEQ ID NO: 1251 - DNA, 829 bp, Homo sapiens
tggggagtgaaagcgaaagcccgggcgactagccgggagaccagagatctagcgactgaagcagcatggccaagccgtgtggggtgcgcctgagcggggaagcccgcaaacaggtggaggtcttcagacagaatcttttccaggaggctgaggaattcctctacagattcttgccacagaaaatcatatacctgaatcagctcttgcaagaggactccctcaatgtggctgacttgacttccctccgggccccactggacatccccatcccagaccctccacccaaggatgatgagatggaaacagataagcaggagaagaaagaagtccataagtgtggatttctccctgggaatgagaaagtcctgtccctgcttgccctggttaagccagaagtctggactctcaaagagaaatgcattctggtgattacatggatccaacacctgatccccaagattgaagatggaaatgattttggggtagcaatccaggagaaggtgctggagagggtgaatgccgtcaagaccaaagtggaagctttccagacaaccatttccaagtacttctcagaacgtggggatgctgtggccaaggcctccaaggagactcatgtaatggattaccgggccttggtgcatgagcgagatgaggcagcctatggggagctcagggccatggtgctggacctgagggccttctatgctgagctttatcatatcatcagcagcaacctggagaaaattgtcaacccaaagggtgaagaaaagccatctatgtactgaacccgggactagaaggaaaataaatgatctatatgttgtgtgga

SEQ ID NO: 1252 - DNA, 1370 bp, Homo sapiens
gaagaggcggggtttagaggcgtgaaactccgcagtgctcagccaagcagggagcaacgctaggaagggcgggcagaaagggcacgctcttgtgggtgactacaggttaggagaccgttgaacctggaggggccctaggatggaccccgtggaaagattcagagactgcgccctctccctggcgccgccttcccctacacgcggcgggtatattctgttgcagttggcccaggacctgtttccaagactctgccccctcgcacttccgtccctcctggttttgtaaagtgatgctcataggaacccccaccccgcgtgacactactcccagctcctggctgacttctagtcttctggttgaagctgcgcctttagatgacacgaccctacccacccctgtttccagcggatgcccgggcctggagcccacagaattcttccagtccctgggtggggacggagaaaggaacgttcagattgagatggcccatggcaccaccacgctcgccttcaagttccagcatggagtgattgcagcagtggattctcgggcctcagctgggtcctacattagtgccttacgggtgaacaaggtgattgagattaacccttacctgcttggcaccatgtctggctgtgcagcagactgtcagtactgggagcgcctgctggccaaggaatgcaggctgtactatctgcgaaatggagaacgtatttcagtgtcggcagcctccaagctgctgtccaacatgatgtgccagtaccggggcatgggcctctctatgggcagtatgatctgtggctgggataagaagggtcctggactctactacgtggatgaacatgggactcggctctcaggaaatatgttctccacgggtagtgggaacacttatgcctacggggtcatggacagtggctatcggcctaatcttagccctgaagaggcctatgaccttggccgcagggctattgcttatgccactcacagagacagctattctggaggcgttgtcaatatgtaccacatgaaggaagatggttgggtgaaagtagaaagtacagatgtcagtgacctgctgcaccagtaccgggaagccaatcaataatggtggtggtggcagctgggcaggtctcctctgggaggtcttggccgactcagggacctaagccacgttaagtccaaggagaagaagaggcctagcctgagccaaagagagagtacgggctcagcagccagaggaggccggtgaagtgcatcttctgcgtgttctctatttgaacaagcatttcccccagggaagtttctgggtgccccactaagtagaataaagaaaaacggttataaataaaaaaaaaaaaaaaaaaaa

SEQ ID NO: 1253 - DNA, 971 bp, Homo sapiens
gattgcttgaggagagaagtatgtgatcagaaagcattctttgtctattaactcctgcccagcaaaagtgaaagaaaattcatgggagcatgcaagaacaaagagcacagcaaagctggacaaacacagcaatccaggcaggggatttccaactcaactctggtatgtaagctgcatgcaaagtcctttttctgtctctggtttctggccccttgtctgcagagatggctcccaatgcttcctgcctctgtgtgcatgtccgttccgaggaatgggatttaatgacctttgatgccaacccatatgacagcgtgaaaaaaatcaaagaacatgtccggtctaagaccaaggttcctgtgcaggaccaggttcttttgctgggctccaagatcttaaagccacggagaagcctctcatcttacggcattgacaaagagaagaccatccaccttaccctgaaagtggtgaagcccagtgatgaggagctgcccttgtttcttgtggagtcaggtgatgaggcaaagaggcacctcctccaggtgcgaaggtccagctcagtggcacaagtgaaagcaatgatcgagactaagacgggtataatccctgagacccagattgtgacttgcaatggaaagagactggaagatgggaagatgatggcagattacggcatcagaaagggcaacttactcttcctggcatcttattgtattggagggtgaccaccctgggcatggggtgttggcaggggtcaaaaagcttatttcttttaatctcttactcaacgaacacatcttctgatgatttcccaaaattaatgagaatgagatgagtagagtaagatttgggtgggatgggtaggatgaagtatattgcccaactctatgtttctttgattctaacacaattaattaagtgacatgatttttactaatgtattactgagactagtaaataaatttttaagccaa

SEQ ID NO: 1254 - DNA, 1260 bp, Homo sapiens
gggggtggggtccccggggcggggcggggcgcgctgtgtcgcgggtcggagctcggtcctgctggaggccacgggtgccacacactcggtcccgacatgatggcgagcatgcgagtggtgaaggagctggaggatcttcagaagaagcctcccccatacctgcggaacctgtccagcgatgatgccaatgtcctggtgtggcacgctctcctcctacccgaccaacctccctaccacctgaaagccttcaacctgcgcatcagcttcccgccggagtatccgttcaagcctcccatgatcaaattcacaaccaagatctaccaccccaacgtggacgagaacggacagatttgcctgcccatcatcagcagtgagaactggaagccttgcaccaagacttgccaagtcctggaggccctcaatgtgctggtgaatagaccgaatatcagggagcccctgcggatggacctcgctgacctgctgacacagaatccggagctgttcagaaagaatgccgaagagttcaccctccgattcggagtggaccggccctcctaactcatgttctgaccctctgtgcactggatcctcggcatagcggacggacacacctcatggactgaggccagagccccctgtggcccattccccattcatttttcccttcttaggttgttagtcattagtttgtgtgtgtgtgtggtggagggaagggagctatgagtgtgtgtgttgtgtatggactcactcccaggttcacctggccacaggtgcacccttcccacaccctttacattccccagagccaagggagtttaagtttgcagttacaggccagttctccagctctccatcttagagagacaggtcaccttgcaggcctgcttgcaggaaatgaatccagcagccaactcgaatccccctagggctcaggcactgagggcctggggacagtggagcatatgggtgggagacagatggagggtaccctatttacaactgagtcagccaagccactgatgggaatatacagatttaggtgctaaaccgtttattttccacggatgagtcacaatctgaagaatcaaacttccatcctgaaaatctatatgtttcaaaaccacttgccatcctgttagattgccagttcctgggaccaggcctcagactgtgaagtatatatcctccagcattcagtccagggggagccacggaaaccatgttcttgcttaagccattaaagtcagagatgaattctgg

SEQ ID NO: 1255 - DNA, 2974 bp, Homo sapiens
gtgtgcgtgatggagaaaattgggcaccagggctgctcccgagattctcagatctgatttccacgcttgctaccaaaatagtctgggcaggccacttttggaagtaggcgttatctagtgagcaggcggccgctttcgatttcgctttcccctaaatggctgagcttctcgccagcgcaggatcagcctgttcctgggactttccgagagccccgccctcgttccctcccccagccgccagtaggggaggactcggcggtacccggagcttcaggccccaccggggcgcggagagtcccaggcccggccgggaccgggacggcgtccgagtgccaatggctagctctaggtgtcccgctccccgcgggtgccgctgcctccccggagcttctctcgcatggctggggacagtactgctacttctcgccgactgggtgctgctccggaccgcgctgccccgcatattctccctgctggtgcccaccgcgctgccactgctccgggtctgggcggtgggcctgagccgctgggccgtgctctggctgggggcctgcggggtcctcagggcaacggttggctccaagagcgaaaacgcaggtgcccagggctggctggctgctttgaagccattagctgcggcactgggcttggccctgccgggacttgccttgttccgagagctgatctcatggggagcccccgggtccgcggatagcaccaggctactgcactggggaagtcaccctaccgccttcgttgtcagttatgcagcggcactgcccgcagcagccctgtggcacaaactcgggagcctctgggtgcccggcggtcagggcggctctggaaaccctgtgcgtcggcttctaggctgcctgggctcggagacgcgccgcctctcgctgttcctggtcctggtggtcctctcctctcttggggagatggccattccattctttacgggccgcctcactgactggattctacaagatggctcagccgataccttcactcgaaacttaactctcatgtccattctcaccatagccagtgcagtgctggagttcgtgggtgacgggatctataacaacaccatgggccacgtgcacagccacttgcagggagaggtgtttggggctgtcctgcgccaggagacggagtttttccaacagaaccagacaggtaacatcatgtctcgggtaacagaggacacgtccaccctgagtgattctctgagtgagaatctgagcttatttctgtggtacctggtgcgaggcctatgtctcttggggatcatgctctggggatcagtgtccctcaccatggtcaccctgatcaccctgcctctgcttttccttctgcccaagaaggtgggaaaatggtaccagttgctggaagtgcaggtgcgggaatctctggcaaagtccagccaggtggccattgaggctctgtcggccatgcctacagttcgaagctttgccaacgaggagggcgaagcccagaagtttagggaaaagctgcaagaaataaagacactcaaccagaaggaggctgtggcctatgcagtcaactcctggaccactagtatttcaggtatgctgctgaaagtgggaatcctctacattggtgggcagctggtgaccagtggggctgtaagcagtgggaaccttgtcacatttgttctctaccagatgcagttcacccaggctgtggaggtactgctctccatctaccccagagtacagaaggctgtgggctcctcagagaaaatatttgagtacctggaccgcacccctcgctgcccacccagtggtctgttgactcccttacacttggagggccttgtccagttccaagatgtctcctttgcctacccaaaccgcccagatgtcttagtgctacaggggctgacattcaccctacgccctggcgaggtgacggcgctggtgggacccaatgggtctgggaagagcacagtggctgccctgctgcagaatctgtaccagcccaccgggggacagctgctgttggatgggaagccccttccccaatatgagcaccgctacctgcacaggcaggtggctgcagtgggacaagagccacaggtatttggaagaagtcttcaagaaaatattgcctatggcctgacccagaagccaactatggaggaaatcacagctgctgcagtaaagtctggggcccatagtttcatctctggactccctcagggctatgacacagaggtagacgaggctgggagccagctgtcagggggtcagcgacaggcagtggcgttggcccgagcattgatccggaaaccgtgtgtacttatcctggatgatgccaccagtgccctggatgcaaacagccagttacaggtggagcagctcctgtacgaaagccctgagcggtactcccgctcagtgcttctcatcacccagcacctcagcctggtggagcaggctgaccacatcctctttctggaaggaggcgctatccgggaggggggaacccaccagcagctcatggagaaaaaggggtgctactgggccatggtgcaggctcctgcagatgctccagaatgaaagccttctcagacctgcgcactccatctccctcccttttcttctctctgtggtggagaaccacagctgcagagtaggcagctgcctccaggatgagttacttgaaatttgccttgagtgtgttacctcctttccaagctcctcgtgataatgcagacttcctggagtacaaacacaggatttgtaattccttactgtaacggagtttagagccagggctgatgctttggtgtggccagcactctgaaactgagaaatgttcagaatgtacggaaagatgatcagctattttcaacataactgaaggcatatgctggcccataaacaccctgtaggttcttgatatttataataaaattggtgttttgtaaaaaaaaaaaaaaaaaaaaaaa

SEQ ID NO: 1256 - DNA, 1373 bp, Homo sapiens
gggaggagagaaaagccatggccgacaaggtcctgaaggagaagagaaagctgtttatccgttccatgggtgaaggtacaataaatggcttactggatgaattattacagacaagggtgctgaacaaggaagagatggagaaagtaaaacgtgaaaatgctacagttatggataagacccgagctttgattgactccgttattccgaaaggggcacaggcatgccaaatttgcatcacatacatttgtgaagaagacagttacctggcagggacgctgggactctcagcagatcaaacatctggaaattaccttaatatgcaagactctcaaggagtactttcttcctttccagctcctcaggcagtgcaggacaacccagctatgcccacatcctcaggctcagaagggaatgtcaagctttgctccctagaagaagctcaaaggatatggaaacaaaagtcggcagagatttatccaataatggacaagtcaagccgcacacgtcttgctctcattatctgcaatgaagaatttgacagtattcctagaagaactggagctgaggttgacatcacaggcatgacaatgctgctacaaaatctggggtacagcgtagatgtgaaaaaaaatctcactgcttcggacatgactacagagctggaggcatttgcacaccgcccagagcacaagacctctgacagcacgttcctggtgttcatgtctcatggtattcgggaaggcatttgtgggaagaaacactctgagcaagtcccagatatactacaactcaatgcaatctttaacatgttgaataccaagaactgcccaagtttgaaggacaaaccgaaggtgatcatcatccaggcctgccgtggtgacagccctggtgtggtgtggtttaaagattcagtaggagtttctggaaacctatctttaccaactacagaagagtttgaggatgatgctattaagaaagcccacatagagaaggattttatcgctttctgctcttccacaccagataatgtttcttggagacatcccacaatgggctctgtttttattggaagactcattgaacatatgcaagaatatgcctgttcctgtgatgtggaggaaattttccgcaaggttcgattttcatttgagcagccagatggtagagcgcagatgcccaccactgaaagagtgactttgacaagatgtttctacctcttcccaggacattaaaataaggaaactgtatgaatgtctgtgggcaggaagtgaagagatcgttctgtaaaaggtttttggaattatgtctgctgaataataaactttttttgaaataataaatctggtagaaaaatgaaaaaaaaaaaaaaaaaa

SEQ ID NO: 1257 - DNA, 2054 bp, Homo sapiens
tgaagattcagttttcacttaaacaaccagcaagtcttgaagtctcttcccaagcaaatgggagcttctttggaccttggagcacacagaggattctactttctttaaaactttgttttcaggcaatttccctgagaaccgtttacttccagaagattggtggagcttgatctgaaggctggccatgaaatctcaaggtcaacattggtattccagttcagataaaaactgtaaagtgagctttcgtgagaagcttctgattattgattcaaacctgggggtccaagatgtggagaacctcaagtttctctgcataggattggtccccaacaagaagctggagaagtccagctcagcctcagatgtttttgaacatctcttggcagaggatctgctgagtgaggaagaccctttcttcctggcagaactcctctatatcatacggcagaagaagctgctgcagcacctcaactgtaccaaagaggaagtggagcgactgctgcccacccgacaaagggtttctctgtttagaaacctgctctacgaactgtcagaaggcattgactcagagaacttaaaggacatgatcttccttctgaaagactcgcttcccaaaactgaaatgacctccctaagtttcctggcatttctagagaaacaaggtaaaatagatgaagataatctgacatgcctggaggacctctgcaaaacagttgtacctaaacttttgagaaacatagagaaatacaaaagagagaaagctatccagatagtgacacctcctgtagacaaggaagccgagtcgtatcaaggagaggaagaactagtttcccaaacagatgttaagacattcttggaagccttaccgcaggagtcctggcaaaataagcatgcaggtagtaatggtaacagagccacaaatggtgcaccaagcctggtctccagggggatgcaaggagcatctgctaacactctaaactctgaaaccagcacaaagagggcagctgtgtacaggatgaatcggaaccacagaggcctctgtgtcattgtcaacaaccacagctttacctccctgaaggacagacaaggaacccataaagatgctgagatcctgagtcatgtgttccagtggcttgggttcacagtgcatatacacaataatgtgacgaaagtggaaatggagatggtcctgcagaagcagaagtgcaatccagcccatgccgacggggactgcttcgtgttctgtattctgacccatgggagatttggagctgtctactcttcggatgaggccctcattcccattcgggagatcatgtctcacttcacagccctgcagtgccctagactggctgaaaaacctaaactctttttcatccaggcctgccaaggtgaagagatacagccttccgtatccatcgaagcagatgctctgaaccctgagcaggcacccacttccctgcaggacagtattcctgccgaggctgacttcctacttggtctggccactgtcccaggctatgtatcctttcggcatgtggaggaaggcagctggtatattcagtctctgtgtaatcatctgaagaaattggtcccaaggatgctgaaatttctggaaaagacaatggaaatcaggggcaggaagagaacagtgtggggtgctaaacagatctcagcaacctccctgcccacggccatctctgcgcagacacctcgaccccccatgcgcaggtggagcagcgtttcctagttctttccagaggcttccttctgcctgccttccagccacatcgcctgagattgacaacgccctacagcaagacggaaacctccctttacagcaccaccttgcgattctgcagccacaaagttgagacttctgaacgtggcactcttctgttcccttactgtttcacgtgtacctgtgtcatctttcttgtttcatcgtaaacatacttctaaaattcccattttctttatttagaaatagaactacaagcggatggttaaacaatttaaacaaatggtccatggggaaaagtgaatttcacact

SEQ ID NO: 1258 - DNA, 1370 bp, Homo sapiens
tcaggaactggagcagcaaagagaagaacaaaagcgcagagagaaggaagcggaggagaggcagcgagcggaggaaagcagctgtgagcgggtggctcttccccaccttgccagcaggctctgtgctccttgaagcaagcgctccagaggctccggaagccacggctggattggagacaagatgggatcctcagaggaccaggcctatcgcctccttaatgactacgccaacggcttcatggtgtcccaggttctcttcgccgcctgcgagctgggcgtgtttgaccttctcgccgaggccccagggcccctggacgtggcggcagtggctgcaggtgtgagggccagcgcccatgggacagagctcctgctggacatctgtgtgtccctgaagctgctgaaagtggagacgaggggaggaaaagctttctatcgaaacacagagctgtccagcgactacctgaccacggtcagcccgacgtcacaatgcagcatgctgaagtacatgggcaggaccagctaccggtgctggggccacctggcagacgccgtgagagaaggaaggaaccagtacctggagacgtttggcgttcccgctgaagagctttttacggccatctacaggtccgagggcgagcggctacagttcatgcaagctctgcaggaggtctggagcgtcaacgggagaagcgtgctgaccgcctttgacctgtcagtgttcccacttatgtgtgaccttggtgggacacggataaagctggaaaccatcattctcagcaaactatcgcaaggacagaaaaccaaacaccgcgtgttctcactcataggtggggctggagctctggctaaggaatgcatgtctctgtaccctggatgtaagatcaccgtttttgacatcccagaagtggtgtggacggcaaagcagcacttctcattccaggaggaagaacagattgacttccaggaaggggatttcttcaaagaccctcttccggaagctgatctgtacatcctggccagggtcctccatgactgggcagacggaaagtgctcacacctgctggagaggatctaccacacttgcaagccaggtggtggcattctggtaattgaaagcctcctggatgaagacaggcgaggtcctctgctcacgcagctctactctctgaacatgcttgtgcagacggaagggcaggagaggacccccacccactaccacatgctcctctcttctgctggcttcagagacttccagtttaagaaaacaggagccatttatgatgccattttagccaggaaataactgtttcttgtgacctggaactaacgtcaaagcacacaagacataataataaagacatgtacctcca

SEQ ID NO: 1259 - DNA, 1721 bp, Homo sapiens
gaattccctggctgcttgaatctgttctgccccctccccacccatttcaccaccaccatgacaccgggcacccagtctcctttcttcctgctgctgctcctcacagtgcttacagttgttacaggttctggtcatgcaagctctaccccaggtggagaaaaggagacttcggctacccagagaagttcagtgcccagctctactgagaagaatgctgtgagtatgaccagcagcgtactctccagccacagccccggttcaggctcctccaccactcagggacaggatgtcactctggccccggccacggaaccagcttcaggttcagctgccacctggggacaggatgtcacctcggtcccagtcaccaggccagccctgggctccaccaccccgccagcccacgatgtcacctcagccccggacaacaagccagccccgggctccaccgcccccccagcccacggtgtcacctcggccccggacaccaggccgcccccgggctccaccgcccccccagcccacggtgtcacctcggccccggacaccaggccgcccccgggctccaccgcgcccgcagcccacggtgtcacctcggccccggacaccaggccggccccgggctccaccgcccccccagcccatggtgtcacctcggccccggacaacaggcccgccttggcgtccaccgcccctccagtccacaatgtcacctcggcctcaggctctgcatcaggctcagcttctactctggtgcacaacggcacctctgccagggctaccacaaccccagccagcaagagcactccattctcaattcccagccaccactctgatactcctaccacccttgccagccatagcaccaagactgatgccagtagcactcaccatagcacggtacctcctctcacctcctccaatcacagcacttctccccagttgtctactggggtctctttctttttcctgtcttttcacatttcaaacctccagtttaattcctctctggaagatcccagcaccgactactaccaagagctgcagagagacatttctgaaatgtttttgcagatttataaacaagggggttttctgggcctctccaatattaagttcaggccaggatctgtggtggtacaattgactctggccttccgagaaggtaccatcaatgtccacgacgtggagacacagttcaatcagtataaaacggaagcagcctctcgatataacctgacgatctcagacgtcagcgtgagtgatgtgccatttcctttctctgcccagtctggggctggggtgccaggctggggcatcgcgctgctggtgctggtctgtgttctggttgcgctggccattgtctatctcattgccttggctgtctgtcagtgccgccgaaagaactacgggcagctggacatctttccagcccgggatacctaccatcctatgagcgagtaccccacctaccacacccatgggcgctatgtgccccctagcagtaccgatcgtagcccctatgagaaggtttctgcaggtaatggtggcagcagcctctcttacacaaacccagcagtggcagccacttctgccaacttgtaggggcacgtcgccctctgagctgagtggccagccagtgccattccactccactcagggctctctgggccagtcctcctgggagcccccaccacaacacttcccaggcatggaattcc

SEQ ID NO: 1260 - DNA, 872 bp, Homo sapiens
ctgctttctgcattcttctctccacatgcctctctgtacttacagccccaatggcccccaaaaagccagagcccaagaaggatgatgccaaggcagcccccaaggcagctccagctcccgcacctccccctgagcctgagcgccctaaggaggtcgagtttgatgcttccaagatcaagattgagttcacacctgagcagattgaagagttcaaggaagccttcatgctgttcgaccgcacacccaagtgtgagatgaagatcacctacgggcagtgtggggatgtcctgcgggcgctgggccagaaccccacacaggcagaagtgctccgtgtcctggggaagccaagacaggaagagctcaataccaagatgatggactttgaaactttcctgcctatgctccagcacatttccaagaacaaggacacaggcacctatgaggacttcgtggaggggctgcgggtcttcgacaaggagggcaatggcactgtcatgggtgctgagcttcgccacgtgctggccacgctgggtgagaggctgacagaagacgaagtggagaagttgatggctgggcaagaggactccaatggctgcatcaactatgaagcatttgtgaagcacatcatgtccagctaaacctcgtgcccagaagccaggaaggctgtgcaggacgtctcatctcccatgtgtgatgctgacaccaagcggcctggagtcgtgggaaggaggggagccttaccaagactcctgcaaaaacccttggacctctccacgtggttgccgtctctggcccctctcaggctgtgcttacctgtgacagcagctctgtccccaccccatgggcctcatgaataaaggcttcttgccggc

SEQ ID NO: 1261 - DNA, 1184 bp, Homo sapiens
atctgccacgatgttgctgctcagcctgaccctaagcctggttctcctcggctcctcctggggctgcggcattcctgccatcaaaccggcactgagcttcagccagaggattgtcaacggggagaatgcagtgttgggctcctggccctggcaggtgtccctgcaggacagcagcggcttccacttctgcggtggttctctcatcagccagtcctgggtggtcactgctgcccactgcaatgtcagccctggccgccattttgttgtcctgggcgagtatgaccgatcatcaaacgcagagcccttgcaggttctgtccgtctctcgggccattacacaccctagctggaactctaccaccatgaacaatgacgtgacgctgctgaagctcgcctcgccagcccagtacacaacacgcatctcgccagtttgcctggcatcctcaaacgaggctctgactgaaggcctcacgtgtgtcaccaccggctggggtcgcctcagtggcgtgggcaatgtgacaccagcacatctgcagcaggtggctttgcccctggtcactgtgaatcagtgccggcagtactggggctcaagtatcactgactccatgatctgtgcaggtggcgcaggtgcctcctcgtgccagggtgactccggaggccctcttgtctgccagaagggaaacacatgggtgcttattggtattgtctcctggggcaccaaaaactgcaatgtgcgcgcacctgctgtgtatactcgagttagcaagttcagcacctggatcaaccaggtcatagcctacaactgagctcaccacaggccctccccagctcaacccattaaagacccaggccctgtcccatcatgcattcatgtctgtcttcctggctcaggagaaagaagaggctgttgagggtccgactccctacttggacttctggcacagaaggggctgagtgactccttgagtagcagtggctcttcctagagtagccatgccgaggccggggcccccacccctcctccagggcaaccccttggtcctacagcaagaagccagaactgttggaatgaatggcagccctccctggagaggcagcctgtttactgaatacagaggatacgtttacaaactgaatacgcataataaataactgcacattctccatccaaaaaaaaaaaaaaaa

SEQ ID NO: 1262 - DNA, 853 bp, Homo sapiens
ctagtcctgacttcacttctgatgaggaagcctctctccttagccttcagcctttcctcccaccctgccataagtaatttgatcctcaagaagttaaaccacacctcattggtccctggctaattcaccaatttacaaacagcaggaaatagaaacttaagagaaatacacacttctgagaaactgaaacgacaggggaaaggaggtctcactgagcaccgtcccagcatccggacaccacagcggcccttcgctccacgcagaaaaccacacttctcaaaccttcactcaacacttccttccccaaagccagaagatgcacaaggaggaacatgaggtggctgtgctgggggcaccccccagcaccatccttccaaggtccaccgtgatcaacatccacagcgagacctccgtgcccgaccatgtcgtctggtccctgttcaacaccctcttcttgaactggtgctgtctgggcttcatagcattcgcctactccgtgaagtctagggacaggaagatggttggcgacgtgaccggggcccaggcctatgcctccaccgccaagtgcctgaacatctgggccctgattctgggcatcctcatgaccattggattcatcctgtcactggtattcggctctgtgacagtctaccatattatgttacagataatacaggaaaaacggggttactagtagccgcccatagcctgcaacctttgcactccactgtgcaatgctggccctgcacgctggggctgttgcccctgcccccttggtcctgcccctagatacagcagtttatacccacacacctgtctacagtgtcattcaataaagtgcacgtgcttgtga

SEQ ID NO: 1263 - DNA, 808 bp, Homo sapiens
tgctcccttgggctctagagaggaggcccctcttagccctcagcccctccttcctctctatcttaaagtaatttgatcctcaggaatttgttccgccctcatctggcccggccaaatcccgatttgacaaatgccaggaaaaggaaactgttgagaaaccgaaactactggggaaagggagggctcactgagtaaccatcccagtaacccgaccgccgctggtcttcgctggacaccatgagtcacactgtccaaaccttcttctctcctgtcaacagtggccagccccccaactatgagatgctcaaggaggagcacgaggtggctgtgctgggggggccccacaaccctgctcccccgacgtccaccgtgatccacatccgcagcgagacctccgtgcccgaccatgtcgtctggtccctgttcaacaccctcttcatgaacccctgctgcctgggcttcatagcattcgcctactccgtgaagtctagggacaggaagatggttggcgacgtgaccggggcccaggcctatgcctccaccgccaagtgcctgaacatctgggccctgattctgggcatcctcatgaccattctgctcatcgtcatcccagtgctgatcttccaggcctatggatagatcaggaggcatcactgaggccaggagctctgcccatgacctgtatcccacgtactccaacttccattcctcgccctgcccccggagccgagtcctgtatcagccctttatcctcacacgcttttctacaatggcattcaataaagtgcacgtgtttctggtgctgctg

SEQ ID NO: 1264 - DNA, 974 bp, Homo sapiens
cctgacatggagcctgccagctccgtcagccctgactcggcccggagctgagctccccacctgccggtagcccaggagatggagcagcccagcccacgtgcccggccttccgcccctgacttcacttgataacaaactagaaactgaaacagggtcgggatgccgatgccggcttggagttagagatgagtcaccgctgagagcagctgcagtagctgagcagtggcagcagagaggcagacgtgagctgagggcgcagaggcaggcagcatctctgagggtccccaaggagcatggctgggagccgtgaggtggtggccatggactgcgagatggtggggctggggccccaccgggagagtggcctggctcgttgcagcctcgtgaacgtccacggtgctgtgctgtacgacaagttcatccggcctgagggagagatcaccgattacagaacccgggtcagcggggtcacccctcagcacatggtgggggccacaccatttgccgtggccaggctagagatcctgcagctcctgaaaggcaagctggtggtgggtcatgacctgaagcacgacttccaggcactgaaagaggacatgagcggctacacaatctacgacacgtccactgacaggctgttgtggcgtgaggccaagctggaccactgcaggcgtgtctccctgcgggtgctgagtgagcgcctcctgcacaagagcatccagaacagcctgcttggacacagctcggtggaagatgcgagggcaacgatggagctctatcaaatctcccagagaatccgagcccgccgagggctgccccgcctggctgtgtcagactgaagccccatccagcccgttccgcagggactagaggctttcggctttttgggacagcaactaccttgcttttggaaaatacatttttaatagtaaagtggctctatattttctctacgcaaaaaaaaaaaaaaaaaa

SEQ ID NO: 1265 - DNA, 1181 bp, Homo sapiens
ctgaggtgtatttcgggtcttgctggggctgagagagaccacagccctttggggggtacaaacaagagttcagttgctgtgaattctgccactgtgcccagctctgaagcctcagctcttgccaaacagacccgagacccatgtcagccccactggatgccgccctccacgcccttcaggaggagcaggccagactcaagatgaggctgtgggacctgcagcagctgagaaaggagctcggggactcccccaaagacaaggtcccattttcagtgcccaagatccccctggtattccgaggacacacccagcaggacccggaagtgcctaagtctttagtttccaatttgcggatccactgccctctgcttgcgggctctgctctgatcacctttgatgaccccaaagtggctgagcaggtgctgcaacaaaaggagcacacgatcaacatggaggagtgccggctgcgggtgcaggtccagcccttggagctgcccatggtcaccaccatccaggtgatggtgtccagccagttgagtggccggagggtgttggtcactggatttcctgccagcctcaggctgagtgaggaggagctgctggacaagctagagatcttctttggcaagactaggaacggaggtggcgatgtggacgttcgggagctactgccagggagtgtcatgctggggtttgctagggatggagtggctcagcgtctgtgccaaatcggccagttcacagtgccactgggtgggcagcaagtccctctgagagtctctccgtatgtgaatggggagatccagaaggctgagatcaggtcgcagccagttccccgctcggtactggtgctcaacattcctgatatcttggatggcccggagctgcatgacgtcctggagatccacttccagaagcccacccgcgggggcggggaggtagaggccctgacagtcgtaccccaaggacagcagggcctagcagtcttcacctctgagtcaggctaggggcctccccttctcatcctccccacccccccgccaaggttctcacactggcctgggcttgggtgcccatataggaggtctgtatgttcaccaacagtgcggaggggtcacacattgcaaaacactgcccagaacagtaaaaagagcctgcatgccaaaaaaaaaaaaaaaaaa

SEQ ID NO: 1266 - DNA, 1498 bp, Homo sapiens
accaaacctcttcgaggcacaaggcacaacaggctgctctgggattctcttcagccaatcttcattgctcaagtgtctgaagcagccatggcagaagtacctgagctcgccagtgaaatgatggcttattacagtggcaatgaggatgacttgttctttgaagctgatggccctaaacagatgaagtgctccttccaggacctggacctctgccctctggatggcggcatccagctacgaatctccgaccaccactacagcaagggcttcaggcaggccgcgtcagttgttgtggccatggacaagctgaggaagatgctggttccctgcccacagaccttccaggagaatgacctgagcaccttctttcccttcatctttgaagaagaacctatcttcttcgacacatgggataacgaggcttatgtgcacgatgcacctgtacgatcactgaactgcacgctccgggactcacagcaaaaaagcttggtgatgtctggtccatatgaactgaaagctctccacctccagggacaggatatggagcaacaagtggtgttctccatgtcctttgtacaaggagaagaaagtaatgacaaaatacctgtggccttgggcctcaaggaaaagaatctgtacctgtcctgcgtgttgaaagatgataagcccactctacagctggagagtgtagatcccaaaaattacccaaagaagaagatggaaaagcgatttgtcttcaacaagatagaaatcaataacaagctggaatttgagtctgcccagttccccaactggtacatcagcacctctcaagcagaaaacatgcccgtcttcctgggagggaccaaaggcggccaggatataactgacttcaccatgcaatttgtgtcttcctaaagagagctgtacccagagagtcctgtgctgaatgtggactcaatccctagggctggcagaaagggaacagaaaggtttttgagtacggctatagcctggactttcctgttgtctacaccaatgcccaactgcctgccttagggtagtgctaagaggatctcctgtccatcagccaggacagtcagctctctcctttcagggccaatccccagcccttttgttgagccaggcctctctcacctctcctactcacttaaagcccgcctgacagaaaccacggccacatttggttctaagaaaccctctgtcattcgctcccacattctgatgagcaaccgcttccctatttatttatttatttgtttgtttgttttattcattggtctaatttattcaaagggggcaagaagtagcagtgtctgtaaaagagcctagtttttaatagctatggaatcaattcaatttggactggtgtgctctctttaaatcaagtcctttaattaagactgaaaatatataagctcagattatttaaatgggaatatttataaatgagcaaatatcatactgttcaatggttctgaaataaacttcactgaag

SEQ ID NO: 1267 - DNA, 2984 bp, Homo sapiens
gaggaggaacagaaaagaaaagaaaagaaaaagtgggaaacaaataatctaagaatgaggagaaagcaagaagagtgacccccttgtgggcactccattggttttatggcgcctctactttctggagtttgtgtaaaacaaaaatattatggtctttgtgcacatttacatcaagctcagcctgggcggcacagccagatgcgagatgcgtctctgctgatctgagtctgcctgcagcatggacctgggtcttccctgaagcatctccagggctggagggacgactgccatgcaccgagggctcatccatccacagagcagggcagtgggaggagacgccatgacccccatcctcacggtcctgatctgtctcgggctgagtctgggcccccggacccacgtgcaggcagggcacctccccaagcccaccctctgggctgaaccaggctctgtgatcacccaggggagtcctgtgaccctcaggtgtcaggggggccaggagacccaggagtaccgtctatatagagaaaagaaaacagcaccctggattacacggatcccacaggagcttgtgaagaagggccagttccccatcccatccatcacctgggaacatgcagggcggtatcgctgttactatggtagcgacactgcaggccgctcagagagcagtgaccccctggagctggtggtgacaggagcctacatcaaacccaccctctcagcccagcccagccccgtggtgaactcaggagggaatgtaaccctccagtgtgactcacaggtggcatttgatggcttcattctgtgtaaggaaggagaagatgaacacccacaatgcctgaactcccagccccatgcccgtgggtcgtcccgcgccatcttctccgtgggccccgtgagcccgagtcgcaggtggtggtacaggtgctatgcttatgactcgaactctccctatgagtggtctctacccagtgatctcctggagctcctggtcctaggtgtttctaagaagccatcactctcagtgcagccaggtcctatcgtggcccctgaggagaccctgactctgcagtgtggctctgatgctggctacaacagatttgttctgtataaggacggggaacgtgacttccttcagctcgctggcgcacagccccaggctgggctctcccaggccaacttcaccctgggccctgtgagccgctcctacgggggccagtacagatgctacggtgcacacaacctctcctccgagtggtcggcccccagcgaccccctggacatcctgatcgcaggacagttctatgacagagtctccctctcggtgcagccgggccccacggtggcctcaggagagaacgtgaccctgctgtgtcagtcacagggatggatgcaaactttccttctgaccaaggagggggcagctgatgacccatggcgtctaagatcaacgtaccaatctcaaaaataccaggctgaattccccatgggtcctgtgacctcagcccatgcggggacctacaggtgctacggctcacagagctccaaaccctacctgctgactcaccccagtgaccccctggagctcgtggtctcaggaccgtctgggggccccagctccccgacaacaggccccacctccacatctggccctgaggaccagcccctcacccccaccgggtcggatccccagagtggtctgggaaggcacctgggggttgtgatcggcatcttggtggccgtcatcctactgctcctcctcctcctcctcctcttcctcatcctccgacatcgacgtcagggcaaacactggacatcgacccagagaaaggctgatttccaacatcctgcaggggctgtggggccagagcccacagacagaggcctgcagtggaggtccagcccagctgccgatgcccaggaagaaaacctctatgctgccgtgaagcacacacagcctgaggatggggtggagatggacactcggagcccacacgatgaagacccccaggcagtgacgtatgccgaggtgaaacactccagacctaggagagaaatggcctctcctccttccccactgtctggggaattcctggacacaaaggacagacaggcggaagaggacaggcagatggacactgaggctgctgcatctgaagccccccaggatgtgacctacgcccagctgcacagcttgacccttagacggaaggcaactgagcctcctccatcccaggaagggccctctccagctgtgcccagcatctacgccactctggccatccactagcccagggggggacgcagaccccacactccatggagtctggaatgcatgggagctgcccccccagtggacaccattggaccccacccagcctggatctaccccaggagactctgggaacttttaggggtcactcaattctgcagtataaataactaatgtctctacaattttgaaataaagcaacagacttctcaataatcaatgaagtagctgagaaaactaagtcagaaagtgcattaaactgaatcacaatgtaaatattacacatcaagcgatgaaactggaaaactacaagccacgaatgaatgaattaggaaagaaaaaaagtaggaaatgaatgatcttggctttcctataagaaatttagggcagggcacggtggctcacgcctgtaattccagcactttgggaggccgaggcgggcagatcacgagttcaggagatcgagaccatcttggccaacatggtgaaaccctgtctctcctaaaaatacaaaaattagctggatgtggtggcagtgcctgtaatcccagctatttgggaggctgaggcaggagaatcgcttgaaccagggagtcagaggtttcagtgagccaagatcgcaccactgctctccagcctggcgacagagggagactccatctcaaattaaaaaaaaaaaaaaaaaagaaagaaaaaaaaaaaaaaaaaa

SEQ ID NO: 1268 - DNA, 1100 bp, Homo sapiens
ctaaagctgggttggtagctcctacctactgtgtggcaagaaggtatgggtcatgaacagaaccaaggagctgcgctgctacagatgttaccacttctgtggctgctaccccactcctgggccgtccctgaagctcctactccaatgtggccagatgacctgcaaaaccacacattcctgcacacagtgtactgccaggatgggagtcccagtgtgggactctctgaggcctacgacgaggaccagcttttcttcttcgacttttcccagaacactcgggtgcctcgcctgcccgaatttgctgactgggctcaggaacagggagatgctcctgccattttatttgacaaagagttctgcgagtggatgatccagcaaatagggccaaaacttgatgggaaaatcccggtgtccagagggtttcctatcgctgaagtgttcacgctgaagcccctggagtttggcaagcccaacactttggtctgttttgtcagtaatctcttcccacccatgctgacagtgaactggcagcatcattccgtccctgtggaaggatttgggcctacttttgtctcagctgtcgatggactcagcttccaggccttttcttacttaaacttcacaccagaaccttctgacattttctcctgcattgtgactcacgaaattgaccgctacacagcaattgcctattgggtaccccggaacgcactgccctcagatctgctggagaatgtgctgtgtggcgtggcctttggcctgggtgtgctgggcatcatcgtgggcattgttctcatcatctacttccggaagccttgctcaggtgactgattcttccagaccagagtttgatgccagcagcttcggccatccaaacagaggatgctcagatttctcacatcctgcccaggatctcctcttagggtagaagaagtctctgggacatccctggggtgtgtgtgtagatttcccacctggggactctgctgtccctgggcttgcatcccagggatcccagagtggcctgcctatcacaaccacatcccttccccccacaaggcaataaatctcatttctttaaaaaaaaaaaaaaaaaaaaa

SEQ ID NO: 1269 - DNA, 2431 bp, Homo sapiens
gttttgcctgctagcatctccctgtaactctcccaatcttgaggagtgatccctgtcccagcccctggaaaggggcaggaacgacaaactcaaagtccaggatgttcaccatgacaagagccatggaagaggctctttttcagcacttcatgcaccagaagctggggatcgcctatgccatacacaagccatttcccttctttgaaggcctcctagacaactccatcatcactaagagaatgtacatggaatctctggaagcctgtagaaatttgatccctgtatccagagtggtgcacaacattctcacccaactggagaggacttttaacctgtctcttctggtgacattgttcagtcaaattaacctgcgtgaatatcccaatctggtgacgatttacagaagcttcaaacgtgttggtgcttcctatgaacggcagagcagagacacaccaatcctacttgaagccccaactggcctagcagaaggaagctccctccataccccactggcgctgcccccaccacaaccccctcaaccaagctgttcaccctgtgcgccaagagtcagtgagcctggaacatcctcccagcaaagcgatgagatcctgagtgagtcgcccagcccatctgaccctgtcctgcctctccctgcactcatccaggaaggaagaagcacttcagtgaccaatgacaagttaacatccaaaatgaatgcggaagaagactcagaagagatgcccagcctcctcactagcactgtgcaagtggccagtgacaacctgatcccccaaataagagataaagaagaccctcaagagatgccccactctcccttgggctctatgccagagataagagataattctccagaaccaaatgacccagaagagccccaggaggtgtccagcacaccttcagacaagaaaggaaagaaaagaaaaagatgtatctggtcaactccaaaaaggagacataagaaaaaaagcctcccaagagggacagcctcatctagacacggaatccaaaagaagctcaaaagggtggatcaggttcctcaaaagaaagatgactcaacttgtaactccacggtagagacaagggcccaaaaggcgagaactgaatgtgcccgaaagtcgagatcagaggagatcattgatggcacttcagaaatgaatgaaggaaagaggtcccagaagacgcctagtacaccacgaagggtcacacaaggggcagcctcacctgggcatggcatccaagagaagctccaagtggtggataaggtgactcaaaggaaagacgactcaacctggaactcagaggtcatgatgagggtccaaaaggcaagaactaaatgtgcccgaaagtccagatcgaaagaaaagaaaaaggagaaagatatctgttcaagctcaaaaaggagatttcagaaaaatattcaccgaagaggaaaacccaaaagtgacactgtggattttcactgttctaagctccccgtgacctgtggtgaggcgaaagggattttatataagaagaaaatgaaacacggatcctcagtgaagtgcattcggaatgaggatggaacttggttaacaccaaatgaatttgaagtcgaaggaaaaggaaggaacgcaaagaactggaaacggaatatacgttgtgaaggaatgaccctaggagagctgctgaagcggaaaaactcggatgaatgcgaggtgtgctgtcaagggggacaacttctctgctgcggtacttgtccacgagtcttccatgaggactgtcacatcccccctgtggaagccaagaggatgctgtggagttgcaccttctgcaggatgaagaggtcttcaggaagccaacagtgccatcatgtatctaagaccctggagaggcagatgcagcctcaggaccagctgaaatgtgagttcctcctcttgaaggcctactgtcatccacaaagctccttttttacgggcatcccatttaatattcgagattacggtgagccctttcaggaagcaatgtggttggacctggttaaggaaaggctgattacggaaatgtacacggtggcatggtttgtgcgagacatgcgcctgatgtttcgcaaccataaaacattttacaaggcttctgactttggccaggtaggacttgacttagaggcagaatttgaaaaagatctcaaagacgtgctcggttttcatgaagccaatgacggcggtttctggactcttccttgaccctgttctgtaaagactgaagcatccccacctcaggattcagctgatgggaccctggcttggactgttgattgccagtgagtctgggatgtaattggctgccctcaggacccaaacccagacacttcataggattatcacaccctccatctttattctttctttttacctttaaaagtctatatcta

SEQ ID NO: 1270 - DNA, 1103 bp, Homo sapiens
cacagagcccgggccgcaggcacctcctcgccagctcttccgctcctctcacagccgccagacccgcctgctgagccccatggcccgcgctgctctctccgccgcccccagcaatccccggctcctgcgagtggcactgctgctcctgctcctggtagccgctggccggcgcgcagcaggagcgtccgtggccactgaactgcgctgccagtgcttgcagaccctgcagggaattcaccccaagaacatccaaagtgtgaacgtgaagtcccccggaccccactgcgcccaaaccgaagtcatagccacactcaagaatgggcggaaagcttgcctcaatcctgcatcccccatagttaagaaaatcatcgaaaagatgctgaacagtgacaaatccaactgaccagaagggaggaggaagctcactggtggctgttcctgaaggaggccctgcccttataggaacagaagaggaaagagagacacagctgcagaggccacctggattgtgcctaatgtgtttgagcatcgcttaggagaagtcttctatttatttatttattcattagttttgaagattctatgttaatattttaggtgtaaaataattaagggtatgattaactctacctgcacactgtcctattatattcattctttttgaaatgtcaaccccaagttagttcaatctggattcatatttaatttgaaggtagaatgttttcaaatgttctccagtcattatgttaatatttctgaggagcctgcaacatgccagccactgtgatagaggctggcggatccaagcaaatggccaatgagatcattgtgaaggcaggggaatgtatgtgcacatctgttttgtaactgtttagatgaatgtcagttgttatttattgaaatgatttcacagtgtgtggtcaacatttctcatgttgaaactttaagaactaaaatgttctaaatatcccttggacattttatgtctttcttgtaaggcatactgccttgtttaatggtagttttacagtgtttctggcttagaacaaaggggcttaattattgatgttttcatagagaatataaaaataaagcacttatag

SEQ ID NO: 1271 - DNA, 1064 bp, Homo sapiens
  modified_base (27)..(27): a, c, g, t, unknown or other
  modified_base (766)..(766): a, c, g, t, unknown or other
cacagccgggtcgcaggcacctccccngccagctctcccgcattctgcacagcttcccgacgcgtctgctgagccccatggcccacgccacgctctccgccgcccccagcaatccccggctcctgcgggtggcgctgctgctcctgctcctggtgggcagccggcgcgcagcaggagcgtccgtggtcactgaactgcgctgccagtgcttgcagacactgcagggaattcacctcaagaacatccaaagtgtgaatgtaaggtcccccggaccccactgcgcccaaaccgaagtcatagccacactcaagaatgggaagaaagcttgtctcaaccccgcatcccccatggttcagaaaatcatcgaaaagatactgaacaaggggagcaccaactgacaggagagaagtaagaagcttatcagcgtatcattgacacttcctgcagggtggtccctgcccttaccagagctgaaaatgaaaaagagaacagcagctttctagggacagctggaaagggacttaatgtgtttgactatttcttacgagggttctacttatttatgtatttatttttgaaagcttgtattttaatattttacatgctgttatttaaagatgtgagtgtgtttcatcaaacatagctcagtcctgattatttaattggaatatgatgggttttaaatgtgtcattaaactaatatttagtgggagaccataatgtgtcagccaccttgataaatgacagggtggggaactggagggtngggggattgaaatgcaagcaattagtggatcactgttagggtaagggaatgtatgtacacatctattttttatacttttttttttaaaaaagaatgtcagttgttatttattcaaattatctcacattatgtgttcaacatttttatgctgaagtttcccttagacattttatgtcttgcttgtagggcataatgccttgtttaatgtccattctgcagcgtttctctttcccttggaaaagagaatttatcattactgttacatttgtacaaatgacatgataataaaagttttatg

SEQ ID NO: 1272 - DNA, 1666 bp, Homo sapiens
ctccataaggcacaaactttcagagacagcagagcacacaagcttctaggacaagagccaggaagaaaccaccggaaggaaccatctcactgtgtgtaaacatgacttccaagctggccgtggctctcttggcagccttcctgatttctgcagctctgtgtgaaggtgcagttttgccaaggagtgctaaagaacttagatgtcagtgcataaagacatactccaaacctttccaccccaaatttatcaaagaactgagagtgattgagagtggaccacactgcgccaacacagaaattattgtaaagctttctgatggaagagagctctgtctggaccccaaggaaaactgggtgcagagggttgtggagaagtttttgaagagggctgagaattcataaaaaaattcattctctgtggtatccaagaatcagtgaagatgccagtgaaacttcaagcaaatctacttcaacacttcatgtattgtgtgggtctgttgtagggttgccagatgcaatacaagattcctggttaaatttgaatttcagtaaacaatgaatagtttttcattgtaccatgaaatatccagaacatacttatatgtaaagtattatttatttgaatctacaaaaaacaacaaataatttttaaatataaggattttcctagatattgcacgggagaatatacaaatagcaaaattgaggccaagggccaagagaatatccgaactttaatttcaggaattgaatgggtttgctagaatgtgatatttgaagcatcacataaaaatgatgggacaataaattttgccataaagtcaaatttagctggaaatcctggatttttttctgttaaatctggcaaccctagtctgctagccaggatccacaagtccttgttccactgtgccttggtttctcctttatttctaagtggaaaaagtattagccaccatcttacctcacagtgatgttgtgaggacatgtggaagcactttaagttttttcatcataacataaattattttcaagtgtaacttattaacctatttattatttatgtatttatttaagcatcaaatatttgtgcaagaatttggaaaaatagaagatgaatcattgattgaatagttataaagatgttatagtaaatttattttattttagatattaaatgatgttttattagataaatttcaatcagggtttttagattaaacaaacaaacaattgggtacccagttaaattttcatttcagataaacaacaaataattttttagtataagtacattattgtttatctgaaattttaattgaactaacaatcctagtttgatactcccagtcttgtcattgccagctgtgttggtagtgctgtgttgaattacggaataatgagttagaactattaaaacagccaaaactccacagtcaatattagtaatttcttgctggttgaaacttgtttattatgtacaaatagattcttataatattatttaaatgactgcatttttaaatacaaggctttatatttttaactttaagatgtttttatgtgctctccaaattttttttactgtttctgattgtatggaaatataaaagtaaatatgaaacatttaaaatataatttgttgtcaaagtaaaaaaaaaaaaaaa

SEQ ID NO: 1273 - DNA, 773 bp, Homo sapiens
aagccacctcaagtggacaaggcacttaccaacagagattgctgatttgctccttaagcaagagattcactgccgctaagcatggctcagaccaactcgttcttcatgctgatctcctccctgatgttcctgtctctgagccaaggccaggagtcccagacagagctgcctaatccccgaatcagctgcccagaaggcaccaatgcctatcgctcctactgctactactttaatgaagaccctgagacctgggttgatgcagatctctattgccagaacatgaattcaggcaacctggtgtctgtgctcacccaggcggagggtgccttcgtggcctcactgattaaggagagtagcactgatgacagcaatgtctggattggcctccatgacccaaaaaagaaccgccgctggcactggagtagtgggtccctggtctcctacaagtcctgggacactggatccccgagcagtgctaatgctggctactgtgcaagcctgacttcatgctcaggattcaagaaatggaaggatgaatcttgtgagaagaagttctcctttgtttgcaagttcaaaaactagaggaagctgaaaaatggatgtctagaactggtcctgcaattactatgaagtcaaaaattaaactagactatgtctccaactcagttcagaccatctcctccctaatgagtttgcatcgctgatcttcagtaccttcacctgtctcagtctctagagccctgaaaaataaaaacaaacttatttttatccag

SEQ ID NO: 1274 - DNA, 428 bp, Homo sapiens
atgtctcttgtcagctgtctttcagaagacctggtggggcaagtccgtgggcatcatgttgaccgagctggagaaagccttgaactctatcatcgacgtctaccacaagtactccctgataaaggggaatttccatgccgtctacagggatgacctgaagaaattgctagagaccgagtgtcctcagtatatcaggaaaaagggtgcagacgtctggttcaaagagttggatatcaacactgatggtgcagttaacttccaggagttcctcattctggtgataaagatgggcgtggcagcccacaaaaaaagccatgaagaaagccacaaagagtagctgagttactgggcccagaggctgggcccctggacatgtacctgcagaataataaagtcatcaatacctcaaaaaaaaaaaaaaaaaaaaa

SEQ ID NO: 1275 - DNA, 1365 bp, Homo sapiens
agaaacagaatcctaactatttctgaggaaactgcaggtccaaaatgtggctgcttttaacaatggcaagtttgatatctgtactggggactacacatggtttgtttggaaaattacatcctggaagccctgaagtgactatgaacattagtcagatgattacttattggggatacccaaatgaagaatatgaagttgtgactgaagatggttatattcttgaagtcaatagaattccttatgggaagaaaaattcagggaatacaggccagagacctgttgtgtttttgcagcatggtttgcttgcatcagccacaaactggatttccaacctgccgaacaacagccttgccttcattctggcagatgctggttatgatgtgtggctgggcaacagcagaggaaacacctgggccagaagaaacttgtactattcaccagattcagttgaattctgggctttcagctttgatgaaatggctaaatatgaccttccagccacaatcgacttcattgtaaagaaaactggacagaagcagctacactatgttggccattcccagggcaccaccattggttttattgccttttccaccaatcccagcctggctaaaagaatcaaaaccttctatgctctagctcctgttgccactgtgaagtatacaaaaagccttataaacaaacttagatttgttcctcaatccctcttcaagtttatatttggtgacaaaatattctacccacacaacttctttgatcaatttcttgctactgaagtgtgctcccgtgagatgctgaatctcctttgcagcaatgccttatttataatttgtggatttgacagtaagaactttaacacgagtcgcttggatgtgtatctatcacataatccagcaggaacttctgttcaaaacatgttccattggacccaggctgttaagtctgggaaattccaagcttatgactggggaagcccagttcagaataggatgcactatgatcagtcccaacctccctactacaatgtgacagccatgaatgtaccaattgcagtgtggaacggtggcaaggacctgttggctgacccccaagatgttggccttttgcttccaaaactccccaatcttatttaccacaaggagattcctttttacaatcacttggactttatctgggcaatggatgcccctcaagaagtttacaatgacattgtttctatgatatcagaagataaaaagtagttctggatttaaagaattatccgtttgtttttccaaaatactttattctctcatacatagtattttcataatgtttgacatgcagtgcttctttctgtaattttgactttagaaatatattggc

SEQ ID NO: 1276 - DNA, 1848 bp, Homo sapiens
atggatgcagatggggaggggacgaggcagtgggggtgtgtgtgtgtttcttgggggggctctgtgtctgttgaggggctctggtgtgtgtgttgcgggctctggtgtgtgtcttgggggctctggtgtgtgtgttggctctggtgtgtgtgttggagggctctggggtgtgtgttgggggctctggtgtgtgtgtgttgggggctctggtgtgtgtgtgttgggggctctggtgtgtgttggggactctggtgtgtgtgtgttgggggctctggtgtgtgtgtgtgttgggggctctggtgtgtgtgttggaggctctggtgtgtgtgttggaggctctggtgtgtgtgttgggggctctggtgtgtgtgtgttgggggctctggtgtgtgtgtgttggaggctctggtgtgtatgtgttgggaggctctggtgtgtgtgttgggggctctggtgtgtgtgttgggggctctggtgtgtgtgtgttgggaggctctggtgtgtgtgttgggggctctggtgtgtgtgttgggggctctggtgtctgtgtgttgggggctctggtctgtgtgtgttgggggctctagagtgtgtgtgttggaggctctggtgtgtgtgtggggggctgtggtatgtgtgttggaggctctgatgtgtcaggggggctctgtgcgtattggggactctgttgtgtgtgtgttggagggctttggtatgtgtgttgggccctgtgtgtattgcgggctctggtgtatatgttggggtctctgtgttggggggctctggtgtgtgtgttggggggctctggtgtatatgttgggggctctgttgggggctctggtgtgtgtgttggggggctctggtgtatatgttgggggctctgtgttggggactggtgtgtgttgggggctctgtgtattggggctctggtgtgttggggggctctggtgtatatgttggggactctggaggctctggggtgtgtgtgtgtgtgtgttggaggctccactgtgtgttggctctggtgtgtatgtgttgggggctgtgtgtgtctgtgttgggggctctggtgtgtatgttttgggctctgtgtgtgttgggggctgtggtgtgtgtgtgtgtgtaggaaactgttgtgtcaggaagctctggtgtgtgtgttgggggctctgtattggggctctggtgtgtgtgttagggggctctggtgtgtgtgttgggggctctgtgtgtattgggggctctggtgtgtatgttgggggctcgtgtgtgtgttggaagctctggtgtatgtgttgggggctctggtgtgtgtgttgggggctctggtgtgtgttttgggaggctctggtgtgtgtgtgtgtgttgggggctctggtgtgtaggtgttggagggtctgctgtgtaggagtgttgggggctctcctgtgtgtgtgtgtgttggaggcctctggtgtgtatgtgttggaggctctggtgtgtgtgtgttgggggcactggtgtgtgtgttgggggctctggtgtgtgtgttgggggctctggtgtgtgtgtgtgttggaggctctggtgtgtgtgtgttggaggctctggtgtgtatgtgttgaaggctctggtgtgtgtgtgttggaggctcttgtgtgtgttcgaggctctggtgtgtctgtgtgttggaggctctggtgtgtgtgttggggggctctggtgtatgtgttgggggctctggtgtgtgtattgggggctgtgtgttgggggctgtgtgtgtgttggggcaccaaggcacattgtaggtgctctgggagagcctctccctggctgtttgactttggacacgtgctttggcctctctga

SEQ ID NO: 1277 - DNA, 1593 bp, Homo sapiens
gggggctttctgagagtcatggacctcctgtgcaagaacatgaagcacctgtggttcttcctcctgctggtggcggctcccagatgggtcctgtcccggctgcagctgcaggagtcgggcccaggcctgctgaagccttcggtgaccctgtccctcacctgcactgtctcgggtgactccgtcgccagtagttcttattactggggctgggtccgtcagcccccagggaagggactcgagtggatagggactatcaattttagtggcaatatgtattatagtccgtccctcaggagtcgagtgaccatgtcggcagacatgtccgagaactccttctatctgaaattggactctgtgaccgcagcagacacggccgtctattattgtgcggcaggacacctcgttatgggatttggggcccactggggacagggaaaactggtctccgtctctccagcttccaccaagggcccatccgtcttccccctggcgccctgctccaggagcacctccgagagcacagccgccctgggctgcctggtcaaggactacttccccgaaccggtgacggtgtcgtggaactcaggcgccctgaccagcggcgtgcacaccttcccggctgtcctacagtcctcaggactctactccctcagcagcgtggtgaccgtgccctccagcagcttgggcacgaagacctacacctgcaacgtagatcacaagcccagcaacaccaaggtggacaagagagttgagtccaaatatggtcccccatgcccatcatgcccagcacctgagttcctggggggaccatcagtcttcctgttccccccaaaacccaaggacactctcatgatctcccggacccctgaggtcacgtgcgtggtggtggacgtgagccaggaagaccccgaggtccagttcaactggtacgtggatggcgtggaggtgcataatgccaagacaaagccgcgggaggagcagttcaacagcacgtaccgtgtggtcagcgtcctcaccgtcctgcaccaggactggctgaacggcaaggagtacaagtgcaaggtctccaacaaaggcctcccgtcctccatcgagaaaaccatctccaaagccaaagggcagccccgagagccacaggtgtacaccctgcccccatcccaggaggagatgaccaagaaccaggtcagcctgacctgcctggtcaaaggcttctaccccagcgacatcgccgtggagtgggagagcaatgggcagccggagaacaactacaagaccacgcctcccgtgctggactccgacggctccttcttcctctacagcaggctaaccgtggacaagagcaggtggcaggaggggaatgtcttctcatgctccgtgatgcatgaggctctgcacaaccactacacacagaagagcctctccctgtctctgggtaaatgagtgccagggccggcaagcccccgctccccgggctctcggggtcgcgcgaggatgcttggcacgtaccccgtctacatacttcccaggcacccagcatggaaataaagcacccaccactgccctgcaaaaaaaaaaaaaaaaaaaaaaaaaaaa

SEQ ID NO: 1278 - DNA, 475 bp, Homo sapiens
acacatctgctcctgctctctctcctccagcgaccctagccatgagaaccctcaccatcctcactgctgttctcctcgtggccctccaggccaaggctgagccactccaagctgaggatgatccactgcaggcaaaagcttatgaggctgatgcccaggagcagcgtggggcaaatgaccaggactttgccgtctcctttgcagaggatgcaagctcaagtcttagagctttgggctcaacaagggctttcacttgccattgcagaaggtcctgttattcaacagaatattcctatgggacctgcactgtcatgggtattaaccacagattctgctgcctctgagggatgagaacagagagaaatatattcataatttactttatgacctagaaggaaactgtcgtgtgtcccatacattgccatcaactttgtttcctcatctcaaataaagtcctttcagcaaaaaaaaaaaa

SEQ ID NO: 1279 - DNA, 1101 bp, Homo sapiens
ggaaatttctgaaactgagttttaaacctggcaactcttttaccatccctttgtatttttgcagttcctccctataccagcttccttacagccgttctgatttcctgtcgtaagattttttcttttcattttctccagggagggtaaatcaattaacctcttctctagagaggaggtggttaggttggtcttaagcagtgttagaagatctattttttttcaaaccaggtgtctgagctgggtgaattccagcctggggagaggactttgatcaccagatgtttttttggtgtgcgtgctgtcttatggttgcgtggcgagtttctgcttcagatgcagagcactgtccagagcttcctccagtggacaatagcatatttgtcgcaaaggaggtggaaggacagattctggggacttacgtttgtatcaagggctaccacctggtaggaaagaagacccttttttgcaatgcctctaaggagtgggataacaccactactgagtgccgcttgggccactgtcctgatcctgtgctggtgaatggagagttcagttcttcagggcctgtgaatgtaagtgacaaaatcacgtttatgtgcaatgaccactacatcctcaagggcagcaatcggagccagtgtctagaggaccacacctgggcacctccctttcccatctgcaaaagtagggactgtgaccctcctgggaatccagttcatggctattttgaaggaaataacttcaccttaggatccaccattagttattactgtgaagacaggtactacttagtgggcgtgcaggagcagcaatgcgttgatggggagtggagcagtgcacttccagtctgcaagttgatccaggaagctcccaaaccagagtgtgagaaggcacttcttgcctttcaggagagtaagaacctctgcgaagccatggagaactttatgcaacaattaaaggaaagtggcatgacaatggaggagctaaaatattctctggagctgaagaaagctgagttgaaggcaaaattgttgtaacactacagctgagcagatgtaatagaaataaacctatgaataaattttcttcttggttctgaaa

SEQ ID NO: 1280 - DNA, 2308 bp, Homo sapiens
cccggggcgtatgacgccggagccctctgaccgcacctctgaccacaacaaacccctactccacccgtcttgtttgtcccacccttggtgacgcagagccccagcccagaccccgcccaaagcactcatttaactggtattgcggagccacgaggcttctgcttactgcaactcgctccggccgctgggcgtagctgcgactcggcggagtcccggcggcgcgtccttgttctaacccggcgcgccatgaccgtcgcgcggccgagcgtgcccgcggcgctgcccctcctcggggagctgccccggctgctgctgctggtgctgttgtgcctgccggccgtgtggggtgactgtggccttcccccagatgtacctaatgcccagccagctttggaaggccgtacaagttttcccgaggatactgtaataacgtacaaatgtgaagaaagctttgtgaaaattcctggcgagaaggactcagtgatctgccttaagggcagtcaatggtcagatattgaagagttctgcaatcgtagctgcgaggtgccaacaaggctaaattctgcatccctcaaacagccttatatcactcagaattattttccagtcggtactgttgtggaatatgagtgccgtccaggttacagaagagaaccttctctatcaccaaaactaacttgccttcagaatttaaaatggtccacagcagtcgaattttgtaaaaagaaatcatgccctaatccgggagaaatacgaaatggtcagattgatgtaccaggtggcatattatttggtgcaaccatctccttctcatgtaacacagggtacaaattatttggctcgacttctagtttttgtcttatttcaggcagctctgtccagtggagtgacccgttgccagagtgcagagaaatttattgtccagcaccaccacaaattgacaatggaataattcaaggggaacgtgaccattatggatatagacagtctgtaacgtatgcatgtaataaaggattcaccatgattggagagcactctatttattgtactgtgaataatgatgaaggagagtggagtggcccaccacctgaatgcagaggaaaatctctaacttccaaggtcccaccaacagttcagaaacctaccacagtaaatgttccaactacagaagtctcaccaacttctcagaaaaccaccacaaaaaccaccacaccaaatgctcaagcaacacggagtacacctgtttccaggacaaccaagcattttcatgaaacaaccccaaataaaggaagtggaaccacttcaggtactacccgtcttctatctgggcacacgtgtttcacgttgacaggtttgcttgggacgctagtaaccatgggcttgctgacttagccaaagaagagttaagaagaaaatacacacaagtatacagactgttcctagtttcttagacttatctgcatattggataaaataaatgcaattgtgctcttcatttaggatgctttcattgtctttaagatgtgttaggaatgtcaacagagcaaggagaaaaaaggcagtcctggaatcacattcttagcacacctacacctcttgaaaatagaacaacttgcagaattgagagtgattcctttcctaaaagtgtaagaaagcatagagatttgttcgtatttagaatgggatcacgaggaaaagagaaggaaagtgatttttttccacaagatctgtaatgttatttccacttataaaggaaataaaaaatgaaaaacattatttggatatcaaaagcaaataaaaacccaattcagtctcttctaagcaaaattgctaaagagagatgaaccacattataaagtaatctttggctgtaaggcattttcatctttccttcgggttggcaaaatattttaaaggtaaaacatgctggtgaaccaggggtgttgatggtgataagggaggaatatagaatgaaagactgaatcttcctttgttgcacaaatagagtttggaaaaagcctgtgaaaggtgtcttctttgacttaatgtctttaaaagtatccagagatactacaatattaacataagaaaagattatatattatttctgaatcgagatgtccatagtcaaatttgtaaatcttattcttttgtaatatttatttatatttatttatgacagtgaacattctgattttacatgtaaaacaagaaaagttgaagaagatatgtgaagaaaaatgtatttttcctaaatagaaataaatgatcccattttttggtaaaaaaaaaaaaaaaaaaaaaaaaa

SEQ ID NO: 1281 - DNA, 894 bp, Homo sapiens
gcccgtcttcgtgtctcctccctccctcgccttcctccttcctagctcctctcctccagggccagactgagcccaggttgatttcaggcggacaccaatagactccacagcagctccaggagcccagacaccggcggccagaagcaaggctaggagctgctgcagccatgtcggccctcagcctcctcattctgggcctgctcacggcagtgccacctgccagctgtcagcaaggcctggggaaccttcagccctggatgcagggccttatcgcggtggccgtgttcctggtcctcgttgcaatcgcctttgcagtcaaccacttctggtgccaggaggagccggagcctgcacacatgatcctgaccgtcggaaacaaggcagatggagtcctggtgggaacagatggaaggtactcttcgatggcggccagtttcaggtccagtgagcatgagaatgcctatgagaatgtgcccgaggaggaaggcaaggtccgcagcaccccgatgtaaccttctctgtggctccaaccccaagactcccaggcacatgggatggatgtccagtgctaccacccaagccccctccttctttgtgtggaatctgcaatagtgggctgactccctccagccccatgccggccctacccgcccttgaagtatagccagccaaggttggagctcagaccgtgtctaggttggggctcggctgtggccctggggtctcctgctcagctcagaagagccttctggagaggacagtcagctgagcacctcccatcctgctcacacgtccttccccataactatggaaatggccctaatttctgtgaaataaagactttttgtatttctggggctgaggctcagcaacagcccctcaggcttccagtga

SEQ ID NO: 1282 - DNA, 1110 bp, Homo sapiens
gacagagcccgggccacggagctccttgccagctctcctcctcgcacagccgctcgaaccgcctgctgagccccatggcccgcgccacgctctccgccgcccccagcaatccccggctcctgcgggtggcgctgctgctcctgctcctggtggccgccagccggcgcgcagcaggagcgcccctggccactgaactgcgctgccagtgcttgcagaccctgcagggaattcacctcaagaacatccaaagtgtgaaggtgaagtcccccggaccccactgcgcccaaaccgaagtcatagccacactcaagaatgggcagaaagcttgtctcaaccccgcatcgcccatggttaagaaaatcatcgaaaagatgctgaaaaatggcaaatccaactgaccagaaggaaggaggaagcttattggtggctgttcctgaaggaggccctgccttacaggaacagaagaggaaagagagacacagctgcagaggccacctggcttgcgcctaatgtgtttgagcatacttaggagaagtcttctatttatttatttatttatttatttgtttgttttagaagattctatgttaatattttatgtgtaaaataaggttatgattgaatctacttgcacactctcccattatatttattgtttattttaggtcaaacccaagttagttcaatcctgattcatatttaatttgaagatagaaggtttgcagatattctctagtcatttgttaatatttcttcgtgatgacatatcacatgtcagccactgtgatagaggctgaggaatccaagaaaatggccagtaagatcaatgtgacggcagggaaatgtatgtgtgtctattttgtaactgtaaagatgaatgtcagttgttatttattgaaatgatttcacagtgtgtggtcaacatttctcatgttgaagctttaagaactaaaatgttctaaatatcccttggcattttatgtctttcttgtaagatactgccttgtttaatgttaattatgcagtgtttccctctgtgttagagcagagaggtttcgatatttattgatgttttcacaaagaacaggaaaataaaatatttaaaaatat

SEQ ID NO: 1283 - DNA, 7686 bp, Homo sapiens
tttatagcagcagcagaaatataccaccctagaggacacacctccttttagctaggtacctataaatgtccaggattttctattcaattgagaagaacccagcaaaatggggatctccacagtcatccttgaaatgtgtcttttatggggacaagttctatctacaggtgggtggatcccaaggactacagactacgcttcactgattccctcggaggtgcccttggatcaaactgtagcagaaggttctccatttccctcggagtcgaccctggagtcaactgcagcagaaggttctccgatttccttggagtcaaccctggagtcaactgtagcagaaggttctctgattccctcagagtcaaccctggagtcaactgtagcagaaggatctgattctggtttggccctgaggctggtgaatggagatggcaggtgtcagggccgagtggagatcctataccgaggctcctggggcaccgtgtgtgatgacagctgggacaccaatgatgccaacgtggtctgtaggcagctgggttgtggctgggccatgtcagctccaggaaatgcctggtttggccagggctcaggacccattgccctggatgatgtgcgctgctcaggacacgaatcctacctgtggagctgcccccacaatggctggctctcccataactgtggccatggtgaagatgctggtgttatctgctcagctgcccagcctcagtcaacactcaggccagaaagttggcctgtcaggatatcaccacctgtacccacagaaggatctgaatccagtttggccctgaggctggtgaatggaggcgacaggtgtcgaggccgagtggaggtcctataccgaggctcctggggcaccgtgtgtgatgactactgggacaccaatgatgccaatgtggtctgcaggcagctgggctgtggctgggccatgtcagccccaggaaatgcccagtttggccagggctcaggacccattgtcctggatgatgtgcgctgctcaggacacgagtcctacctgtggagctgcccccacaatggctggctcacccacaactgtggccatagtgaagacgctggtgtcatctgctcagctccccagtcccggccgacacccagcccagatacttggccgacctcacatgcatcaacagcaggacctgaatccagtttggccctgaggctggtgaatggaggtgacaggtgtcagggccgagtggaggtcctataccgaggctcctggggcaccgtgtgtgatgatagctgggacaccagtgacgccaatgtggtctgccggcagctgggctgtggctgggccacgtcagccccaggaaatgcccggtttggccagggttcaggacccattgtcctggatgacgtgcgctgctcaggctatgagtcctacctgtggagctgcccccacaatggctggctctcccataactgtcagcacagtgaagacgctggtgtcatctgctcagctgcccactcctggtcgacgcccagtccagacacgttgccgaccatcaccttacctgcatcgacagtaggatctgaatccagtttggccctgaggctggtgaatggaggtgacaggtgtcagggccgagtggaggtcctataccgaggctcctggggcaccgtgtgtgatgacagctgggacaccaatgatgccaatgtggtctgcaggcagctgggctgtggctgggccatgttggccccaggaaatgcccggtttggtcagggctcaggacccattgtcctggatgacgtgcgctgctcagggaatgagtcctacttgtggagctgcccccacaatggctggctctcccataactgtggccatagtgaagacgctggtgtcatctgctcaggacctgaatccagtttggccctgaggctggtgaatggaggtgacaggtgtcagggccgagtggaggtcctataccgaggctcttggggcaccgtgtgtgatgacagctgggacaccaatgatgccaatgtggtctgcaggcagctgggctgtggctgggccatgtcagccccaggaaatgcccggtttggtcagggctcaggacccattgtcctggatgatgtgcgctgctcaggacatgagtcctacctgtggagctgccccaacaatggctggctctcccacaactgtggccatcatgaagatgctggtgtcatctgctcagctgcccagtcccggtcgacgcccaggccagacacgttgtcgaccatcacgttacctccatcgacagtaggatctgaatccagtttgaccctgaggctggtgaatggaagtgacaggtgtcagggccgagtagaggtcctataccgaggctcctggggcaccgtgtgtgatgacagctgggataccaatgatgccaatgtggtctgcaggcagctgggctgtggctgggccatgtcagccccaggaaatgcccggtttggccagggctcaggacccattgttctggatgatgtgcgctgctcaggacacgagtcctacctgtggagctgcccccacaatggctggctctcccacaactgtggccatcatgaagatgctggtgtcatctgctcagtttcccagtcccggccgacacccagtccagatacttggccgacctcacatgcatcaacagcaggatctgaatccagtttggccctgaggctggtgaatggaggtgacaggtgtcagggccgagtggaggtcctataccgaggctcctggggcaccgtgtgtgatgatagctgggacaccagtgacgccaatgtggtctgccggcagctgggctgtggctgggccacgtcagccccaggaaatgcccggtttggccagggttcaggacccattgtcctggatgacgtgcgctgctcaggctatgagtcctacctgtggagctgcccccacaatggctggctctcccataactgtcagcacagtgaagacgctggtgtcatctgctcagctgcccactcctggtcgacgcccagtccagacacattgccgaccatcaccttgcctgcatcgacagtaggatctgaatccagtttggccctgaggctggtgaatggaggtgacaggtgtcagggccgagtggaggtcctataccaaggctcctggggcaccgtgtgcgatgacagctgggacaccaatgatgccaatgtcgtctgcaggcaaccgggctgtggctgggccatgtcagccccaggaaatgcccggtttggtcagggctcaggacccattgtcctggatgatgtgcgctgctcaggacacgagtcttacccgtggagctgcccccacaatggctggctctcccacaactgtggccatagtgaagacgctggtgtcatctgctcagcttcccagtcccggccaacacctagtccagacacttggccaacctcacatgcatcaacagcaggatctgaatccagtttggccctgaggctggtgaatggaggtgacaggtgtcagggccgagtggaggtcctataccgaggctcctggggcaccgtgtgtgatgactactgggacaccaatgatgccaatgtggtttgcaggcagctgggctgtggctgggccatgtcagccccaggaaatgcccggtttggccagggttcaggacccattgtcctggatgatgtgcgctgctcaggacatgagtcctatctgtggagctgcccccacaatggctggctctcccacaactgtggccatcatgaagacgctggtgtcatctgctcagcttcccagtcccagccgacacccagcccagacacttggccaacctcacatgcatcaacagcaggatctgaatccagtttggccctgaggctggtgaatggaggtgacaggtgtcagggccgagtggaggtcctataccgaggctcctggggcaccgtgtgtgatgactactgggacaccaatgatgccaatgtggtttgcaggcagctgggctgtggctgggccacgtcagccccaggaaatgcccggtttggccagggttcaggacccattgtcctggatgatgtgcgctgctcaggacatgagtcctatctgtggagctgcccccacaatggctggctctcccacaactgtggccatcatgaagacgctggtgtcatctgctcagcttcccagtcccagccgacacccagcccagacacttggccaacctcacatgcatcaacagcaggatctgaatccagtttggccctgaggctggtgaatggaggtgacaggtgtcagggccgagtggaggtcctataccgaggctcctggggcaccgtgtgtgatgactactgggacaccaatgatgccaatgtggtttgcaggcagctgggctgtggctgggccacgtcagccccaggaaatgcccggtttggccagggttcaggacccattgtcctggatgatgtgcgctgctcaggacatgagtcctatctgtggagctgcccccacaatggctggctctcccacaactgtggccatcatgaagacgctggtgtcatctgctcagcttcccagtcccagccgacacccagcccagacacttggccaacctctcgtgcatcaacagcaggatctgaatccactttggccctgagactggtgaatggaggtgacaggtgtcgaggccgagtggaggtcctataccaaggctcctggggcaccgtgtgtgatgactactgggacaccaatgatgccaacgtggtctgcaggcagctgggctgtggctgggccatgtcagccccaggaaatgcccagtttggccagggctcaggacccattgtcctggatgatgtgcgctgctcaggacacgagtcttacctgtggagctgcccccacaatggctggctctcccacaactgtggccatcatgaagatgctggtgtcatctgctcagctgctcagtcccagtcaacgcccaggccagatacttggctgaccaccaacttaccggcattgacagtaggatctgaatccagtttggctctgaggctggtgaatggaggtgacaggtgtcgaggccgagtggaggtcctgtatcgaggctcctggggaaccgtgtgtgatgacagctgggacaccaatgatgccaatgtggtctgcaggcagctgggctgtggctgggccatgtcggccccaggaaatgcccggtttggccagggctcaggacccattgtcctggatgatgtgcgctgctcagggaatgagtcctacctgtggagctgcccccacaaaggctggctcacccacaactgtggccatcacgaagacgctggtgtcatctgctcagccacccaaataaattctactacgacagattggtggcatccaacaactacaaccactgcaagaccctcttcaaattgtggtggcttcttattctatgccagtgggacattctccagcccatcctaccctgcatactaccccaacaatgctaagtgtgtttgggaaatagaagtgaattctggttatcgcataaacctgggcttcagtaatctgaaattggaggcacaccataactgcagttttgattatgttgaaatctttgatggatcattgaatagcagtctcctgctggggaaaatctgtaatgataccaggcaaatatttacatcttcttacaaccgaatgaccattcactttcgaagtgacatcagtttccaaaacactggctttttggcttggtataactccttcccaagcgatgccaccttgaggttggtcaatttaaattcatcctatggtctatgtgccgggcgtgtagaaatttaccatggtggcacctgggggacagtttgtgatgactcctggaccattcaggaagctgaggtggtctgcagacagctagggtgtggacgtgcagtttcagcccttggaaatgcatattttggctctggctctggccccatcaccctggacgatgtagagtgctcagggacggaatccactctctggcagtgccggaaccgaggctggttctcccacaactgtaatcatcgtgaagatgctggtgtcatctgctcaggaaaccatctatcgacacctgctccttttctcaacatcacccgtccaaacacagattattcctgcggaggcttcctatcccaaccatcaggggacttttccagcccattctatcccgggaactatccaaacaatgccaagtgtgtgtgggacattgaggtgcaaaacaactaccgtgtgactgtgatcttcagagatgtccagcttgaaggtggctgcaactatgattatattgaagttttcgatggcccctaccgcagttcccctctcattgctcgagtttgtgatggggccagaggctccttcacttcttcctccaacttcatgtccattcgcttcatcagtgaccacagcatcacaaggagagggttccgggctgagtactactccagtccctccaatgacagcaccaacctgctctgtctgccaaatcacatgcaagccagtgtgagcaggagctatctccaatccttgggcttttctgccagtgaccttgtcatttccacctggaatggatactacgagtgtcggccccagataacgccgaacctggtgatattcacaattccctactcaggctgcggcaccttcaagcaggcagacaatgacaccatcgactattccaacttcctcacagcagctgtctcaggtggcatcatcaagaggaggacagacctccgtattcacgtcagctgcagaatgcttcagaacacctgggtcgacaccatgtacattgctaatgacaccatccacgttgctaataacaccatccaggtcgaggaagtccagtatggcaattttgacgtgaacatttccttttatacttcctcatctttcttgtatcctgtgaccagccgcccttactacgtggacctgaaccaggacttgtacgttcaggctgaaatcctccattctgatgctgtactgaccttgtttgtggacacctgcgtggcatcaccatactccaatgacttcacgtctttgacttatgatctaatccggagtggatgcgtgagggatgacacctacggaccctactcctcgccgtctcttcgcattgcccgcttccggttcagggccttccacttcctgaaccgcttcccctccgtgtacctgcgttgtaaaatggtggtgtgcagagcgtatgacccctcttcccgctgctaccgaggctgtgtgttgaggtcgaagagggatgtgggctcctaccaggaaaaggtggacgtcgtcctgggtcccatccagctgcagacccccccacgccgagaagaggagcctcggtaggtggtcgctctcagaccccactgtccaccggggcgcagacccctgactcggggacttgggatgttcctcttggtgtcatattccaactcagattgagccctacattgtgctgcacctggtcatacggagttgaatcagacctggttcccgcctcccccaaggctcatggtccttggaggacccgttgcagggcgaggtcaagagagttctgacctggatggcccatagacctgacgtcccagaatccatgcttctcatctgcaaaatgaaaatgtcaatacttacttcttagcactgttgagagggttacttacataaaggaattttggtgaaactgc

SEQ ID NO: 1284 - DNA, 841 bp, Homo sapiens
gaaccgtttactcgctgctgtgcccatctatcagcaggctccgggctgaagattgcttctcttctctcctccaaggtctagtgacggagcccgcgcgcggcgccaccatgcggcagaaggcggtatcgcttttcttgtgctacctgctgctcttcacttgcagtggggtggaggcaggtgagaatgcgggtaaggatgcaggtaagaaaaagtgctcggagagctcggacagcggctccgggttctggaaggccctgaccttcatggccgtcggaggaggactcgcagtcgccgggctgcccgcgctgggcttcaccggcgccggcatcgcggccaactcggtggctgcctcgctgatgagctggtctgcgatcctgaatgggggcggcgtgcccgccggggggctagtggccacgctgcagagcctcggggctggtggcagcagcgtcgtcataggtaatattggtgccctgatgggctacgccacccacaagtatctcgatagtgaggaggatgaggagtagccagcagctcccagaacctcttcttccttcttggcctaactcttccagttaggatctagaactttgcctttttttttttttttttttttttttgagatgggttctcactatattgtccaggctagagtgcagtggctattcacagatgcgaacatagtacactgcagcctccaactcctagcctcaagtgatcctcctgtctcaacctcccaagtaggattacaagcatgcgccgacgatgcccagaatccagaactttgtctatcactctccccaacaacctagatgtgaaaacagaataaacttcacccagaaaa

SEQ ID NO: 1285 - DNA, 845 bp, Homo sapiens
caggtgagcctctcactcgccacctcctcttccacccctgccaggcccagcagccaccacagcgcctgcttcctcggccctgaaatcatgcccctaggtctcctgtggctgggcctagccctgttgggggctctgcatgcccaggcccaggactccacctcagacctgatcccagccccacctctgagcaaggtccctctgcagcagaacttccaggacaaccaattccaggggaagtggtatgtggtaggcctggcagggaatgcaattctcagagaagacaaagacccgcaaaagatgtatgccaccatctatgagctgaaagaagacaagagctacaatgtcacctccgtcctgtttaggaaaaagaagtgtgactactggatcaggacttttgttccaggttgccagcccggcgagttcacgctgggcaacattaagagttaccctggattaacgagttacctcgtccgagtggtgagcaccaactacaaccagcatgctatggtgttcttcaagaaagtttctcaaaacagggagtacttcaagatcaccctctacgggagaaccaaggagctgacttcggaactaaaggagaacttcatccgcttctccaaatctctgggcctccctgaaaaccacatcgtcttccctgtcccaatcgaccagtgtatcgacggctgagtgcacaggtgccgccagctgccgcaccagcccgaacaccattgagggagctgggagaccctccccacagtgccacccatgcagctgctccccaggccaccccgctgatggagccccaccttgtctgctaaataaacatgtgccctcaggccaaaaagaaa

SEQ ID NO: 1286 - DNA, 4221 bp, Homo sapiens
ataactttgtagcgagtcgaaaactgaggctccggccgcagagaactcagcctcattcctgctttaaaatctctcggccacctttgatgaggggactgggcagttctagacagtcccgaagttctcaaggcacaggtctcttcctggtttgactgtccttaccccggggaggcagtgcagccagctgcaagccccacagtgaagaacatctgagctcaaatccagataagtgacataagtgacctgctttgtaaagccatagagatggcctgtccttggaaatttctgttcaagaccaaattccaccagtatgcaatgaatggggaaaaagacatcaacaacaatgtggagaaagccccctgtgccacctccagtccagtgacacaggatgaccttcagtatcacaacctcagcaagcagcagaatgagtccccgcagcccctcgtggagacgggaaagaagtctccagaatctctggtcaagctggatgcaaccccattgtcctccccacggcatgtgaggatcaaaaactggggcagcgggatgactttccaagacacacttcaccataaggccaaagggattttaacttgcaggtccaaatcttgcctggggtccattatgactcccaaaagtttgaccagaggacccagggacaagcctacccctccagatgagcttctacctcaagctatcgaatttgtcaaccaatattacggctccttcaaagaggcaaaaatagaggaacatctggccagggtggaagcggtaacaaaggagatagaaacaacaggaacctaccaactgacgggagatgagctcatcttcgccaccaagcaggcctggcgcaatgccccacgctgcattgggaggatccagtggtccaacctgcaggtcttcgatgcccgcagctgttccactgcccgggaaatgtttgaacacatctgcagacacgtgcgttactccaccaacaatggcaacatcaggtcggccatcaccgtgttcccccagcggagtgatggcaagcacgacttccgggtgtggaatgctcagctcatccgctatgctggctaccagatgccagatggcagcatcagaggggaccctgccaacgtggaattcactcagctgtgcatcgacctgggctggaagcccaagtacggccgcttcgatgtggtccccctggtcctgcaggccaatggccgtgaccctgagctcttcgaaatcccacctgaccttgtgcttgaggtggccatggaacatcccaaatacgagtggtttcgggaactggagctaaagtggtacgccctgcctgcagtggccaacatgctgcttgaggtgggcggcctggagttcccagggtgccccttcaatggctggtacatgggcacagagatcggagtccgggacttctgtgacgtccagcgctacaacatcctggaggaagtgggcaggagaatgggcctggaaacgcacaagctggcctcgctctggaaagaccaggctgtcgttgagatcaacattgctgtgctccatagtttccagaagcagaatgtgaccatcatggaccaccactcggctgcagaatccttcatgaagtacatgcagaatgaataccggtcccgtgggggctgcccggcagactggatttggctggtccctcccatgtctgggagcatcacccccgtgtttcaccaggagatgctgaactacgtcctgtcccctttctactactatcaggtagaggcctggaaaacccatgtctggcaggacgagaagcggagacccaagagaagagagattccattgaaagtcttggtcaaagctgtgctctttgcctgtatgctgatgcgcaagacaatggcgtcccgagtcagagtcaccatcctctttgcgacagagacaggaaaatcagaggcgctggcctgggacctgggggccttattcagctgtgccttcaaccccaaggttgtctgcatggataagtacaggctgagctgcctggaggaggaacggctgctgttggtggtgaccagtacgtttggcaatggagactgccctggcaatggagagaaactgaagaaatcgctcttcatgctgaaagagctcaacaacaaattcaggtacgctgtgtttggcctcggctccagcatgtaccctcggttctgcgcctttgctcatgacattgatcagaagctgtcccacctgggggcctctcagctcaccccgatgggagaaggggatgagctcagtgggcaggaggacgccttccgcagctgggccgtgcaaaccttcaaggcagcctgtgagacgtttgatgtccgaggcaaacagcacattcagatccccaagctctacacctccaatgtgacctgggacccgcaccactacaggctcgtgcaggactcacagcctttggacctcagcaaagccctcagcagcatgcatgccaagaacgtgttcaccatgaggctcaaatctcggcagaatctacaaagtccgacatccagccgtgccaccatcctggtggaactctcctgtgaggatggccaaggcctgaactacctgccgggggagcaccttggggtttgcccaggcaaccagccggccctggtccaaggtatcctggagcgagtggtggatggccccacaccccaccagacagtgcgcctggaggccctggatgagagtggcagctactgggtcagtgacaagaggctgcccccctgctcactcagccaggccctcacctacttcctggacatcaccacacccccaacccagctgctgctccaaaagctggcccaggtggccacagaagagcctgagagacagaggctggaggccctgtgccagccctcagagtacagcaagtggaagttcaccaacagccccacattcctggaggtgctagaggagttcccgtccctgcgggtgtctgctggcttcctgctttcccagctccccattctgaagcccaggttctactccatcagctcctcccgggatcacacgcccacagagatccacctgactgtggccgtggtcacctaccacacccgagatggccagggtcccctgcaccacggcgtctgcagcacatggctcaacagcctgaagccccaagacccagtgccctgctttgtgcggaatgccagcggcttccacctccccgaggatccctcccatccttgcatcctcatcgggcctggcacaggcatcgcgcccttccgcagtttctggcagcaacggctccatgactcccagcacaagggagtgcggggaggccgcatgaccttggtgtttgggtgccgccgcccagatgaggaccacatctaccaggaggagatgctggagatggcccagaagggggtgctgcatgcggtgcacacagcctattcccgcctgcctggcaagcccaaggtctatgttcaggacatcctgcggcagcagctggccagcgaggtgctccgtgtgctccacaaggagccaggccacctctatgtttgcggggatgtgcgcatggcccgggacgtggcccacaccctgaagcagctggtggctgccaagctgaaattgaatgaggagcaggtcgaggactatttctttcagctcaagagccagaagcgctatcacgaagatatctttggtgctgtatttccttacgaggcgaagaaggacagggtggcggtgcagcccagcagcctggagatgtcagcgctctgagggcctacaggaggggttaaagctgccggcacagaacttaaggatggagccagctctgcattatctgaggtcacagggcctggggagatggaggaaagtgatatcccccagcctcaagtcttatttcctcaacgttgctccccatcaagccctttacttgacctcctaacaagtagcaccctggattgatcggagcctcctctctcaaactggggcctccctggtcccttggagacaaaatcttaaatgccaggcctggcaagtgggtgaaagatggaacttgctgctgagtgcaccacttcaagtgaccaccaggaggtgctatcgcaccactgtgtatttaactgccttgtgtacagttatttatgcctctgtatttaaaaaactaacacccagtctgttccccatggccacttgggtcttccctgtatgattccttgatggagatatttacatgaattgcattttactttaatcacaaaaaaaaaaaaaaaa

SEQ ID NO: 1287 - DNA, 807 bp, Homo sapiens
aaaccataccatatcccaccagagagtgactcctgattgcctcctcaagtcgcagacactatgctgcctcccatggccctgcccagtgtatcttggatgctgctttcctgcctcatgctgctgtctcaggttcaaggtgaagaaccccagagggaactgccctctgcacggatccgctgtcccaaaggctccaaggcctatggctcccactgctatgccttgtttttgtcaccaaaatcctggacagatgcagatctggcctgccagaagcggccctctggaaacctggtgtctgtgctcagtggggctgagggatccttcgtgtcctccctggtgaagagcattggtaacagctactcatacgtctggattgggctccatgaccccacacagggcaccgagcccaatggagaaggttgggagtggagtagcagtgatgtgatgaattactttgcatgggagagaaatccctccaccatctcaagccccggccactgtgcgagcctgtcgagaagcacagcatttctgaggtggaaagattataactgtaatgtgaggttaccctatgtctgcaagttcactgactagtgcaggagggaagtcagcagcctgtgtttggtgtgcaactcatcatgggcatgagaccagtgtgaggactcaccctggaagagaatattcgcttaattcccccaacctgaccacctcattcttatctttcttctgtttcttcctccccgctgtcatttcagtctcttcattttgtcatacggcctaaggctttaaagagcaataaaatttttagtctgc

SEQ ID NO: 1288 - DNA, 808 bp, Homo sapiens
gatataaagctcctacagctacctggcctgagaagccaactcagactcagccaacagagattgttgatttgcctcttaagcaagagattcattgcagctcagcatggctcagaccagctcatacttcatgctgatctcctgcctgatgtttctgtctcagagccaaggccaagaggcccagacagagttgccccaggcccggatcagctgcccagaaggcaccaatgcctatcgctcctactgctactactttaatgaagaccgtgagacctgggttgatgcagatctctattgccagaacatgaattcgggcaacctggtgtctgtgctcacccaggccgagggtgcctttgtggcctcactgattaaggagagtggcactgatgacttcaatgtctggattggcctccatgaccccaaaaagaaccgccgctggcactggagcagtgggtccctggtctcctacaagtcctggggcattggagccccaagcagtgttaatcctggctactgtgtgagcctgacctcaagcacaggattccagaaatggaaggatgtgccttgtgaagacaagttctcctttgtctgcaagttcaaaaactagaggcaactggaaaatacatgtctagaactgatccagcaattacaacggagtcaaaaattaaaccggaccatctctccaactcaactcaacctggacactctcttctctgctgagtttgccttgttaatcttcaatagttttacctaccccagtctttggaaccctaaataataaaaataaacatgtttccactattgtgctgtc

SEQ ID NO: 1289 - DNA, 576 bp, Homo sapiens
aaacactctgtgtggctcctcggctttgggacagagtgcaagacgatgacttgcaaaatgtcgcagctggaacgcaacatagagaccatcatcaacaccttccaccaatactctgtgaagctggggcacccagacaccctgaaccagggggaattcaaagagctggtgcgaaaagatctgcaaaattttctcaagaaggagaataagaatgaaaaggtcatagaacacatcatggaggacctggacacaaatgcagacaagcagctgagcttcgaggagttcatcatgctgatggcgaggctaacctgggcctcccacgagaagatgcacgagggtgacgagggccctggccaccaccataagccaggcctcggggagggcaccccctaagaccacagtggccaagatcacagtggccacggccatggccacagtcatggtggccacggccacaggccactaatcaggaggccaggccaccctgcctctacccaaccagggccccggggcctgttatgtcaaactgtcttggctgtggggctaggggctggggccaaataaagtctcttcctccaa

SEQ ID NO: 1290 - DNA, 3522 bp, Homo sapiens
aggggcgagtcctgcgcgagtccccgggaggcgccgcgcgcttggaagggacggtcgggcttccccggcccgctgagggctcggcggcgggctcccctcctttccacctcgggagggagggaaggaggggagggaaaagtcccacggaggaggcagaatggccagtcgaggggcgcttaggcgctgcctttccccagggctgcctcgactcctgcacctgtcccgagggctggcctgagacgggactcccggttctcccgctgcgaagcagcgcggccccccggggccggggcagcggcgccggcatgtcgtctggcaccatgaagttcaatggctatttgagggtccgcatcggtgaggcagtggggctgcagcccacccgctggtccctgcgccactcgctcttcaagaagggccaccagctgctggacccctatctgacggtgagcgtggaccaggtgcgcgtgggccagaccagcaccaagcagaagaccaacaaacccacgtacaacgaggagttttgcgctaacgtcaccgacggcggccacctcgagttggccgtcttccacgagacgcccctgggctacgaccacttcgtggccaactgcaccctgcagttccaggagctgctgcgcacgaccggcgcctcggacaccttcgagggttgggtggatctcgagccagaggggaaagtatttgtggtaataacccttaccgggagtttcactgaagctactctccagagagaccggatcttcaaacattttaccaggaagcgccaaagggctatgcgaaggcgagtccaccagatcaatggacacaagttcatggccacgtatctgaggcagcccacctactgctctcactgcagggagtttatctggggagtgtttgggaaacagggttatcagtgccaagtgtgcacctgtgtcgtccataaacgctgccatcatctaattgttacagcctgtacttgccaaaacaatattaacaaagtggattcaaagattgcagaacagaggttcgggatcaacatcccacacaagttcagcatccacaactacaaagtgccaacattctgcgatcactgtggctcactgctctggggaataatgcgacaaggacttcagtgtaaaatatgtaaaatgaatgtgcatattcgatgtcaagcgaacgtggcccctaactgtggggtaaatgcggtggaacttgccaagaccctggcagggatgggtctccaacccggaaatatttctccaacctcgaaactcgtttccagatcgaccctaagacgacagggaaaggagagcagcaaagaaggaaatgggattggggttaattcttccaaccgacttggtatcgacaactttgagttcatccgagtgttggggaaggggagttttgggaaggtgatgcttgcaagagtaaaagaaacaggagacctctatgctgtgaaggtgctgaagaaggacgtgattctgcaggatgatgatgtggaatgcaccatgaccgagaaaaggatcctgtctctggcccgcaatcaccccttcctcactcagttgttctgctgctttcagacccccgatcgtctgttttttgtgatggagtttgtgaatgggggtgacttgatgttccacattcagaagtctcgtcgttttgatgaagcacgagctcgcttctatgctgcagaaatcatttcggctctcatgttcctccatgataaaggaatcatctatagagatctgaaactggacaatgtcctgttggaccacgagggtcactgtaaactggcagacttcggaatgtgcaaggaggggatttgcaatggtgtcaccacggccacattctgtggcacgccagactatatcgctccagagatcctccaggaaatgctgtacgggcctgcagtagactggtgggcaatgggcgtgttgctctatgagatgctctgtggtcacgcgccttttgaggcagagaacgaagatgacctctttgaggccatactgaatgatgaggtggtctaccctacctggctccatgaagatgccacagggatcctaaaatctttcatgaccaagaaccccaccatgcgcttgggcagcctgactcagggaggcgagcacgccatcttgagacatcctttttttaaggaaatcgactgggcccagctgaaccatcgccaaatagaaccgcctttcagacccagaatcaaatcccgagaagatgtcagtaattttgaccctgacttcataaaggaagagccagttttaactccaattgatgagggacatcttccaatgattaaccaggatgagtttagaaacttttcctatgtgtctccagaattgcaaccatagccttatggggagtgagagagagggcacgagaacccaaagggaatagagattctccaggaatttcctctatgggaccttcccagcatcagccttagaacaagaaccttaccttcaaggagcaagtgaagaactctgtgaaggatggaactttcagatatcaactatttagagtccagagggagccatggcactagaaatagttgataatgaaatgagattttatgaagtataccgctccacctatgagcgtctgtctctgtgggcttgggatgttaacaggagccaaaaggagggaaagtgtgaagaataaagtagatctgagaaattctgagccaatcaggcttcttaattcaagagacaaaccaagacgttctgtcaactgtgctgtgctcttctttaagccaatgaaccccaattcctggcagtctacaagaagtctcttaatgctaatgaagaatttaaaggtctttttaaggaaatgaagggctttccaaatagaatgatttactctgaagaaacaaacaatggtatctctgaaactcacaacctaaagcccaatcttgaaaatatgttgtgcaccaagacgactgcttcagcttcttctcttatccttactttctttaatagatatttattaaactgtccagtgaaaaggtgccacaatgcccagtattgtaaacaacaggtttgcattcatgaagctttcattcattctggagtctactaatttacctgaatggtgtttgcattctgtgaaatgcctctccacgttgcatatgtcacacttttgtctgcacataactcttttttcacaagaagggtcactgccacaacagcacagtcagcgggtgaattacaggtgcctgctgcctgcctacctgggtaatctgatcttgtctgtatcgccgtgtgctcatcactgaagaattgcaggccactcatgtcagtgaccagatttgtggcttataaacattagcagtttatttatgttttaagatgcaaagatgtgtgtttgatattcactttaataattagaaatggatcttgtaaacagggcatatatcaaagatgaccttataatatgtacccgaatatacagttcaagaattttgtctgactggaaataaatgcattttgtagcaaaaggaaaaaaaaaaaaaaaaaa

SEQ ID NO: 1291 - DNA, 4073 bp, Homo sapiens
atggagtggctaagccctgatatcgctctgcccagaagagatgagtggactcaaacttctccagccaggaagaggatcacgcatgccaaagtccagggtgcaggtcagctgaggctgtccattgatgcccaggaccgggttctgctgcttcacattatagaaggtaaaggcctgatcagcaaacagcctggcacctgggatccgtatgtgaagatttctttgatccctgaagatagtagactacgccaccagaagacgcagaccgttccagactgcagagacccggctttccacgagcacttcttctttcctgtccaagaggaggatgatcagaagcgtctcttggttactgtgtggaacagggccagccagtccagacagagtggactcattggctgcatgagctttggggtgaagtctctcctgactccagacaaggagatcagtggttggtactacctcctaggggagcacctgggccgggccaagcacttgaaggtggccaggcggcgactgcggccgctgagagacccgctgctgagaatgccaggaggtggggacactgagaatgggaagaaactaaagatcaccatcccgaggggaaaggacggctttggcttcaccatctgctgcgactctccagttcgagtccaggccgtggattccgggggtccggcggaacgggcagggctgcagcagctggacacggtgctgcagctgaatgagaggcctgtggagcactggaaatgtgtggagctggcccacgagatccggagctgccccagtgagatcatcctactcgtgtggcgcatggtcccccaggtcaagccaggaccagatggcggggtcctgcggcgggcctcctgcaagtcgacacatgacctccagtcaccccccaacaaacgggagaagaactgcacccatggggtccaggcacggcctgagcagcgccacagctgccacctggtatgtgacagctctgatgggctgctgctcggcggctgggagcgctacaccgaggtggccaagcgcgggggccagcacaccctgcctgcactgtcccgtgccactgcccccaccgaccccaactacatcatcctggccccgctgaatcctgggagccagctgctccggcctgtgtaccaggaggataccatccccgaagaatcagggagtcccagtaaagggaagtcctacacaggcctggggaagaagtcccggctgatgaagacagtgcagaccatgaagggccacgggaactaccaaaactgcccggttgtgaggccgcatgccacgcactcaagctatggcacctacgtcaccctggcccccaaagtcctggtgttccctgtctttgttcagcctctagatctctgtaatcctgcccggaccctcctgctgtcagaggagctgctgctgtatgaagggaggaacaaggctgccgaggtgacactgtttgcctattcggacctgctgctcttcaccaaggaggacgagcctggccgctgcgacgtcctgaggaaccccctctacctccagagtgtgaagctgcaggaaggttcttcagaagacctgaaattctgcgtgctctatctagcagagaaggcagagtgcttattcactttggaagcgcactcgcaggagcagaagaagagagtgtgctggtgcctgtcggagaacatcgccaagcagcaacagctggcagcatcacccccggacagcaagatgtttgagacggaggcagatgagaagagggagatggccttggaggaagggaaggggcctggtgccgaggattcacccagcaaggagccctctcctggccaggagcttcctccaggacaagaccttccacccaacaaggactccccttctgggcaggaacccgctcccagccaagaaccactgtccagcaaagactcagctacctctgaaggatcccctccaggcccagatgctccgcccagcaaggatgtgccaccatgccaggaaccccctccagcccaagacctctcaccctgccaggacctacctgctggtcaagaacccctgcctcaccaggaccctctactcaccaaagacctccctgccatccaggaatcccccacccgggaccttccaccctgtcaagatctgcctcctagccaggtctccctgccagccaaggcccttactgaggacaccatgagctccggggacctactagcagctactggggacccacctgcggcccccaggccagccttcgtgatccctgaggtccggctggatagcacctacagccagaaggcaggggcagagcatggctgctcgggagatgaggaggatgcaaaacaggccgaggaggtggaggagggggaggaaggggaggaggacgaggatgaggacaccagcgatgacaactacggagagcgcagtgaggccaagcgcagcagcatgatcgagacgggccagggggctgagggtggcctctcactgcgtgtgcagaactcgctgcggcgccggacgcacagcgagggcagcctgctgcaggagccccgagggccctgctttgcctccgacaccaccttgcactgctcagacggtgagggcgccgcctccacctggggcatgccttcgcccagcaccctcaagaaagagctgggccgcaatggtggctccatgcaccacctttccctcttcttcacaggacacaggaagatgagcggggctgacaccgttggggatgatgacgaagcctcccggaagagaaagagcaaaaacctagccaaggacatgaagaacaagctggggatcttcagacggcggaatgagtcccctggagcccctcccgcgggcaaggcagacaaaatgatgaagtcattcaagcccacctcagaggaagccctcaagtggggcgagtccttggagaagctgctggttcacaaatacgggttagcagtgttccaagccttccttcgcactgagttcagtgaggagaatctggagttctggttggcttgtgaggacttcaagaaggtcaagtcacagtccaaaatggcatccaaggccaagaagatctttgctgaatacatcgcgatccaggcatgcaaggaggtcaacctggactcctacacgcgggagcacaccaaggacaacctgcagagcgtcacgcggggctgcttcgacctggcacagaagcgcatcttcgggctcatggaaaaggactcgtaccctcgctttctccgttctgacctctacctggaccttattaaccagaagaagatgagtcccccgctttaggggccactggagtcgagctcagcgttcacaccaggcgggctgggtcccctgcccacctgcctccctgccccctgtgacggagggggcaagcaagcccccagaggccgtgtctctggacagacggatagacatacggaagcgaggcctggaccaagagaggcccaggctactggaggagtagaaggatgggccccgtggggtccccactgccccggtacgagggggcccaagaccctggcaggtcaggggccctggccaagccagatctggagctgctgctccctgctgcggagaccgcggaggcttcgcgttgaccaagttccttaaagaactggctgatggggcaggaggtccaggcctgggctctcgggccctcctagagggccattggagcttgcagctcagacccccactttgagttttatttatttaaatagtagttggatgcttggcacgtcgtcctgtaataggaaacccttgcctcatcagttttcctgatttacaagtgcaatattttagccaatgccttgggagaagctgccatgcaaaggtggacaccattctccagcttcaggggatatgctcgtcccgggcaccggtggcaggcagctggccttctggactaaggcagcctggggggacactgcagtctggctacacacagagatctggcaccccctgggtggagtgtccctcgggggctttgggaaagcatggcaccctcagaccacacagtagccaagttctggagcaaataaaaggcctgtgttatttcttgttcttgaaaaaaa

SEQ ID NO: 1292 - DNA, 1760 bp, Homo sapiens
gcagcaggccaagggggaggtgcgagcgtggacctgggacgggtctgggcggctctcggtggttggcacgggttcgcacacccattcaagcggcaggacgcacttgtcttagcagttctcgctgaccgcgctagctgcggcttctacgctccggcactctgagttcatcagcaaacgccctggcgtctgtcctcaccatgcctagcctttgggaccgcttctcgtcgtcgtccacctcctcttcgccctcgtccttgccccgaactcccaccccagatcggccgccgcgctcagcctgggggtcggcgacccgggaggaggggtttgaccgctccacgagcctggagagctcggactgcgagtccctggacagcagcaacagtggcttcgggccggaggaagacacggcttacctggatggggtgtcgttgcccgacttcgagctgctcagtgaccctgaggatgaacacttgtgtgccaacctgatgcagctgctgcaggagagcctggcccaggcgcggctgggctctcgacgccctgcgcgcctgctgatgcctagccagttggtaagccaggtgggcaaagaactactgcgcctggcctacagcgagccgtgcggcctgcggggggcgctgctggacgtctgcgtggagcagggcaagagctgccacagcgtgggccagctggcactcgaccccagcctggtgcccaccttccagctgaccctcgtgctgcgcctggactcacgactctggcccaagatccaggggctgtttagctccgccaactctcccttcctccctggcttcagccagtccctgacgctgagcactggcttccgagtcatcaagaagaagctgtacagctcggaacagctgctcattgaggagtgttgaacttcaacctgagggggccgacagtgccctccaagacagagacgactgaacttttggggtggagactagaggcaggagctgagggactgattccagtggttggaaaactgaggcagccacctaaggtggaggtgggggaatagtgtttcccaggaagctcattgagttgtgtgcgggtggctgtgcattggggacacatacccctcagtactgtagcatggaacaaaggcttaggggccaacaaggcttccagctggatgtgtgtgtagcatgtaccttattatttttgttactgacagttaacagtggtgtgacatccagagagcagctgggctgctcccgccccagcctggcccagggtgaaggaagaggcacgtgctcctcagagcagccggagggaggggggaggtcggaggtcgtggaggtggtttgtgtatcttactggtctgaagggaccaagtgtgtttgttgtttgttttgtatcttgtttttctgatcggagcatcactactgacctgttgtaggcagctatcttacagacgcatgaatgtaagagtaggaaggggtgggtgtcagggatcacttgggatctttgacacttgaaaaattacacctggcagctgcgtttaagccttcccccatcgtgtactgcagagttgagctggcaggggaggggctgagagggtgggggctggaacccctccccgggaggagtgccatctgggtcttccatctagaactgtttacatgaagataagatactcactgttcatgaatacacttgatgttcaagtattaagacctatgcaatattttttacttttctaataaacatgtttgttaaaacaaaaaaaaaaaaaaaaa

SEQ ID NO: 1293 - DNA, 3994 bp, Homo sapiens
gcccgctccagccgccgcgcatcctcggcccgcgccccgagacccgcgcccagctagccccggccccgctcggcgccccaggcagctcggctgcgctcgccgcgggacggcgcggccatgaggctgcggggatgcggaccccgggccgcccctgcctccagcgcaggggccagcgacgctcggctgctggcgcccccggggcggaaccccttcgtgcacgagctgcgcctcagcgccctgcagaaggcccaggtggccctcatgacactgacgctcttcccggtccggctcctggttgccgctgccatgatgctgctggcctggcccctcgcacttgtcgcatccctgggctctgcggagaaggaacccgagcagcccccggccctgtggaggaaggttgtggacttcctgctgaaggccatcatgcgcaccatgtggttcgccggcggcttccaccgggtggccgtgaaggggcggcaggcgctgcccaccgaggcggccatcctcacgctcgcgcctcactcgtcctacttcgacgccatccctgtgaccatgacgatgtcctccatcgtgatgaaggcagagagcagagacatcccgatctggggaactctgatccagtatatacggcctgtgttcgtgtcccggtcagaccaggattctcgcaggaaaacagtagaagaaatcaagagacgggcgcagtccaacggaaagtggccacagataatgatttttccagaaggaacttgtacaaacaggacctgcctaattaccttcaaacctggtgcattcatccctggagcgcccgtccagcctgtggttttacgatatccaaataaactggacaccatcacatggacgtggcaaggacctggagcgctggaaatcctgtggctcacgctgtgtcagtttcacaaccaagtggaaatcgagttccttcctgtgtacagcccttctgaggaggagaagaggaaccccgcgctgtatgccagcaacgtgcggcgagtcatggccgaggccttgggtgtctccgtgactgactacacgttcgaggactgccagctggccctggcggaaggacagctccgtctccccgctgacacttgccttttagaatttgccaggctcgtgcggggcctcgggctaaaaccagaaaagcttgaaaaagatctggacagatactcagaaagagccaggatgaagggaggagagaagataggtattgcggagtttgccgcctccctggaagtccccgtttctgacttgctggaagacatgttttcactgttcgacgagagcggcagcggcgaggtggacctgcgagagtgtgtggttgccctgtctgtcgtctgccggccggcccggaccctggacaccatccagctggctttcaagatgtacggagcgcaagaggacggcagcgtcggcgaaggtgacctgtcctgcatcctcaagacggccctgggggtggcagagctcaccgtgaccgacctattccgagccattgaccaagaggagaaggggaagatcacattcgctgacttccacaggtttgcagaaatgtaccctgccttcgcagaggaatacctgtacccggatcagacacatttcgaaagctgtgcagagacctcacctgcgccaatcccaaacggcttctgtgccgatttcagcccggaaaactcagacgctgggcggaagcctgttcgcaagaagctggattaggacccagggttgcggagagacgcggcccctcccgcgtggacatcaccgccatgagcctctttgcgagtgacctctgggctccgctcctcactcctgctgtacaggcactgtcttcagcccgagttccaggggcctcgggggctgtttgtatcttgttcctttgtgaagtgtgttgcagaaccgacgcttactgtgcgagaatcggagggcgcgcacgcggatcccccgcctggcctggaccccgtggggtcaggttccctgccgggcggggggcaccggtgccgccccgtgttctcccacggggccctggtttcgagtctctgtcacagcctcttccggcggcagcgtgcaccgggcgggcctccgtgcacactcagcacacgcctgccacacagcgtgcgcttgcgtgtcactctggcacgaaacctgtctgcctctgtggatccacagcctggcagagccgagccgtcacctgatttttcagtgtttctacctgtgtgctggagctcatgagtattttataaactccatttaggtacttcaggaaacatgcagcattttttaaaaaatgaaaattgtttttctacttcatttttccttttagagtcaaaggatatttatttataggcctttttttttttaatatagaatctgaggctgtttgggctttgacttaaatttccatcaggcctctctccagcaggtaatccctctccttccgctgggtcccctggggaggtgtgaactcaagggcctagccccaaaacactttttctgcttttcttaatccttttccagtcccctctttttttataaacgttggcagtttgatgtttctgtttcggcataacgtaatccatttcactgtagcctaaactccagtccgaggttggatattgttcaaatgagcagggcccgagctggaagcgcaaggcagccgccgccgtgccgctcctcccttgccctcaggccaggtccctgctggaagcggctgcatcttcctgtcagccctggtttccatggtgactggcgtcacgcagccacccgagtatggctgaccttcctgcagagagaggagccgcagtcttttgcttgtggaaggagacgctgggctgtgcggtgcggagggtgatgaggatgtctggtgacagccgtgcggacaccactcctctctgcagcactgcctcccagcgccagggtcgcgggcacatcccactgagagcgggggtcctgccccatcttagagtcaaaggcagaggggcttccaggccctggatggggtattttggtgtcacctgaagtccctctgacatcaccttgtttcatcattttttatgacagaattagaaacccatccttcaagcacaataatcatcacagacttgagtttgcttcctaaagcaaaggctccgggtttgtttggaaaatttttttgatttctgaaatgaattgatttttatatttggggcatctctatagaaagtgaccaccaaggccagtaagtacgggaaaaaatgtttactaacttcctcagagattcgtgatacgcgtttctccactgacagacatttaaaaacaaccttcagctccgtttcaatcaatcacctcgacttgttttttagcatggacactgccagcaggacagacagggatggagtaaaccgaagtcaatttcagggctcttggcgtgttggacacagaagaaatcctagtgcagcctttggtagctaacagtcactgattttataattggagaatgcgtaaagattcatttttcaaggagaagagcctgcaaatggccaatgaaggaggtaaataaactaagatattccgagggaagggacccaggccacctcccttccgcaggtctgcagatgaagggttttttgaatgaaatgccactgtgcattttcagaaaaaaaaatctctgataaacagactttgaatggatgtttgttcctcctgattctcttttctcttcgtggcgacttagagttggcggatattcggaactgtgaatgtacatagcgttgagttaaaccccttgtgtgtgagacaggacgcagcgggcccctggtggcctgggggccagacccgtgggcaggtggggcatgggccctggcctgcggggacctgctggggtgtgagggcagagggagggttgccatgaaggaacttgggattttcaatggaataagtaaaacataaagtctatacttgggaaaaaaaaaaaaaaaaaaaaaaaaaaaaaaaaaaaaaaaaaaaaaaaaaa

SEQ ID NO: 1294 - DNA, 449 bp, Homo sapiens
atatccactcctgctctccctcctgcaggtgaccccagccatgaggaccatcgccatccttgctgccattctcctggtggccctgcaggcccaggctgagtcactccaggaaagagctgatgaggctacaacccagaagcagtctggggaagacaaccaggaccttgctatctcctttgcaggaaatggactctctgctcttagaacctcaggttctcaggcaagagccacctgctattgccgaaccggccgttgtgctacccgtgagtccctctccggggtgtgtgaaatcagtggccgcctctacagactctgctgtcgctgagcttcctagatagaaaccaaagcagtgcaagattcagttcaaggtcctgaaaaaagaaaaacattttactctgtgtaccttgtgtctttctaaatttctctctccaaaataaagttcaagcatt

SEQ ID NO: 1295 - DNA, 9886 bp, Homo sapiens
gcgagaggagtcgggatctgcgctgcagccaccgccgcggttgatactactttgaccttccgagtgcagtgaggcatacatcacaatttggaattatgcattggtttatcaatttacttgtttattgtcaccctgctgcccagatatgacttcatgaggacagtgatgtgtgttctgaaattgtgaaccatgagtctagtacttaatgatctgcttatctgctgccgtcaactagaacatgatagagctacagaacgaaagaaagaagttgagaaatttaagcgcctgattcgagatcctgaaacaattaaacatctagatcggcattcagattccaaacaaggaaaatatttgaattgggatgctgtttttagatttttacagaaatatattcagaaagaaacagaatgtctgagaatagcaaaaccaaatgtatcagcctcaacacaagcctccaggcagaaaaagatgcaggaaatcagtagtttggtcaaatacttcatcaaatgtgcaaacagaagagcacctaggctaaaatgtcaagaactcttaaattatatcatggatacagtgaaagattcatctaatggtgctatttacggagctgattgtagcaacatactactcaaagacattctttctgtgagaaaatactggtgtgaaatatctcagcaacagtggttagaattgttctctgtgtacttcaggctctatctgaaaccttcacaagatgttcatagagttttagtggctagaataattcatgctgttaccaaaggatgctgttctcagactgacggattaaattccaaatttttggactttttttccaaggctattcagtgtgcgagacaagaaaagagctcttcaggtctaaatcatatcttagcagctcttactatcttcctcaagactttggctgtcaactttcgaattcgagtgtgtgaattaggagatgaaattcttcccactttgctttatatttggactcaacataggcttaatgattctttaaaagaagtcattattgaattatttcaactgcaaatttatatccatcatccgaaaggagccaaaacccaagaaaaaggtgcttatgaatcaacaaaatggagaagtattttatacaacttatatgatctgctagtgaatgagataagtcatataggaagtagaggaaagtattcttcaggatttcgtaatattgccgtcaaagaaaatttgattgaattgatggcagatatctgtcaccaggtttttaatgaagataccagatccttggagatttctcaatcttacactactacacaaagagaatctagtgattacagtgtcccttgcaaaaggaagaaaatagaactaggctgggaagtaataaaagatcaccttcagaagtcacagaatgattttgatcttgtgccttggctacagattgcaacccaattaatatcaaagtatcctgcaagtttacctaactgtgagctgtctccattactgatgatactatctcagcttctaccccaacagcgacatggggaacgtacaccatatgtgttacgatgccttacggaagttgcattgtgtcaagacaagaggtcaaacctagaaagctcacaaaagtcagatttattaaaactctggaataaaatttggtgtattacctttcgtggtataagttctgagcaaatacaagctgaaaactttggcttacttggagccataattcagggtagtttagttgaggttgacagagaattctggaagttatttactgggtcagcctgcagaccttcatgtcctgcagtatgctgtttgactttggcactgaccaccagtatagttccaggagcggtaaaaatgggaatagagcaaaatatgtgtgaagtaaatagaagcttttctttaaaggaatcaataatgaaatggctcttattctatcagttagagggtgacttagaaaatagcacagaagtgcctccaattcttcacagtaattttcctcatcttgtactggagaaaattcttgtgagtctcactatgaaaaactgtaaagctgcaatgaattttttccaaagcgtgccagaatgtgaacaccaccaaaaagataaagaagaactttcattctcagaagtagaagaactatttcttcagacaacttttgacaagatggactttttaaccattgtgagagaatgtggtatagaaaagcaccagtccagtattggcttctctgtccaccagaatctcaaggaatcactggatcgctgtcttctgggattatcagaacagcttctgaataattactcatctgagattacaaattcagaaactcttgtccggtgttcacgtcttttggtgggtgtccttggctgctactgttacatgggtgtaatagctgaagaggaagcatataagtcagaattattccagaaagccaactctctaatgcaatgtgcaggagaaagtatcactctgtttaaaaataagacaaatgaggaattcagaattggttccttgagaaatatgatgcagctatgtacacgttgcttgagcaactgtaccaagaagagtccaaataagattgcatctggctttttcctgcgattgttaacatcaaagctaatgaatgacattgcagatatttgtaaaagtttagcatccttcatcaaaaagccatttgaccgtggagaagtagaatcaatggaagatgatactaatggaaatctaatggaggtggaggatcagtcatccatgaatctatttaacgattaccctgatagtagtgttagtgatgcaaacgaacctggagagagccaaagtaccataggtgccattaatcctttagctgaagaatatctgtcaaagcaagatctacttttcttagacatgctcaagttcttgtgtttgtgtgtaactactgctcagaccaatactgtgtcctttagggcagctgatattcggaggaaattgttaatgttaattgattctagcacgctagaacctaccaaatccctccacctgcatatgtatctaatgcttttaaaggagcttcctggagaagagtaccccttgccaatggaagatgttcttgaacttctgaaaccactatccaatgtgtgttctttgtatcgtcgtgaccaagatgtttgtaaaactattttaaaccatgtccttcatgtagtgaaaaacctaggtcaaagcaatatggactctgagaacacaagggatgctcaaggacagtttcttacagtaattggagcattttggcatctaacaaaggagaggaaatatatattctctgtaagaatggccctagtaaattgccttaaaactttgcttgaggctgatccttattcaaaatgggccattcttaatgtaatgggaaaagactttcctgtaaatgaagtatttacacaatttcttgctgacaatcatcaccaagttcgcatgttggctgcagagtcaatcaatagattgttccaggacacgaagggagattcttccaggttactgaaagcacttcctttgaagcttcagcaaacagcttttgaaaatgcatacttgaaagctcaggaaggaatgagagaaatgtcccatagtgctgagaaccctgaaactttggatgaaatttataatagaaaatctgttttactgacgttgatagctgtggttttatcctgtagccctatctgcgaaaaacaggctttgtttgccctgtgtaaatctgtgaaagagaatggattagaacctcaccttgtgaaaaaggttttagagaaagtttctgaaacttttggatatagacgtttagaagactttatggcatctcatttagattatctggttttggaatggctaaatcttcaagatactgaatacaacttatcttcttttccttttattttattaaactacacaaatattgaggatttctatagatcttgttataaggttttgattccacatctggtgattagaagtcattttgatgaggtgaagtccattgctaatcagattcaagaggactggaaaagtcttctaacagactgctttccaaagattcttgtaaatattcttccttattttgcctatgagggtaccagagacagtgggatggcacagcaaagagagactgctaccaaggtctatgatatgcttaaaagtgaaaacttattgggaaaacagattgatcacttattcattagtaatttaccagagattgtggtggagttattgatgacgttacatgagccagcaaattctagtgccagtcagagcactgacctctgtgacttttcaggggatttggatcctgctcctaatccacctcattttccatcgcatgtgattaaagcaacatttgcctatatcagcaattgtcataaaaccaagttaaaaagcattttagaaattctttccaaaagccctgattcctatcagaaaattcttcttgccatatgtgagcaagcagctgaaacaaataatgtttataagaagcacagaattcttaaaatatatcacctgtttgttagtttattactgaaagatataaaaagtggcttaggaggagcttgggcctttgttcttcgagacgttatttatactttgattcactatatcaaccaaaggccttcttgtatcatggatgtgtcattacgtagcttctccctttgttgtgacttattaagtcaggtttgccagacagccgtgacttactgtaaggatgctctagaaaaccatcttcatgttattgttggtacacttataccccttgtgtatgagcaggtggaggttcagaaacaggtattggacttgttgaaatacttagtgatagataacaaggataatgaaaacctctatatcacgattaagcttttagatccttttcctgaccatgttgtttttaaggatttgcgtattactcagcaaaaaatcaaatacagtagaggacccttttcactcttggaggaaattaaccattttctctcagtaagtgtttatgatgcacttccattgacaagacttgaaggactaaaggatcttcgaagacaactggaactacataaagatcagatggtggacattatgagagcttctcaggataatccgcaagatgggattatggtgaaactagttgtcaatttgttgcagttatccaagatggcaataaaccacactggtgaaaaagaagttctagaggctgttggaagctgcttgggagaagtgggtcctatagatttctctaccatagctatacaacatagtaaagatgcatcttataccaaggcccttaagttatttgaagataaagaacttcagtggaccttcataatgctgacctacctgaataacacactggtagaagattgtgtcaaagttcgatcagcagctgttacctgtttgaaaaacattttagccacaaagactggacatagtttctgggagatttataagatgacaacagatccaatgctggcctatctacagccttttagaacatcaagaaaaaagtttttagaagtacccagatttgacaaagaaaacccttttgaaggcctggatgatataaatctgtggattcctctaagtgaaaatcatgacatttggataaagacactgacttgtgcttttttggacagtggaggcacaaaatgtgaaattcttcaattattaaagccaatgtgtgaagtgaaaactgacttttgtcagactgtacttccatacttgattcatgatattttactccaagatacaaatgaatcatggagaaatctgctttctacacatgttcagggatttttcaccagctgtcttcgacacttctcgcaaacgagccgatccacaacccctgcaaacttggattcagagtcagagcactttttccgatgctgtttggataaaaaatcacaaagaacaatgcttgctgttgtggactacatgagaagacaaaagagaccttcttcaggaacaatttttaatgatgctttctggctggatttaaattatctagaagttgccaaggtagctcagtcttgtgctgctcactttacagctttactctatgcagaaatctatgcagataagaaaagtatggatgatcaagagaaaagaagtcttgcatttgaagaaggaagccagagtacaactatttctagcttgagtgaaaaaagtaaagaagaaactggaataagtttacaggatcttctcttagaaatctacagaagtataggggagccagatagtttgtatggctgtggtggagggaagatgttacaacccattactagactacgaacatatgaacacgaagcaatgtggggcaaagccctagtaacatatgacctcgaaacagcaatcccctcatcaacacgccaggcaggaatcattcaggccttgcagaatttgggactctgccatattctttccgtctatttaaaaggattggattatgaaaataaagactggtgtcctgaactagaagaacttcattaccaagcagcatggaggaatatgcagtgggaccattgcacttccgtcagcaaagaagtagaaggaaccagttaccatgaatcattgtacaatgctctacaatctctaagagacagagaattctctacattttatgaaagtctcaaatatgccagagtaaaagaagtggaagagatgtgtaagcgcagccttgagtctgtgtattcgctctatcccacacttagcaggttgcaggccattggagagctggaaagcattggggagcttttctcaagatcagtcacacatagacaactctctgaagtatatattaagtggcagaaacactcccagcttctcaaggacagtgattttagttttcaggagcctatcatggctctacgcacagtcattttggagatcctgatggaaaaggaaatggacaactcacaaagagaatgtattaaggacattctcaccaaacaccttgtagaactctctatactggccagaactttcaagaacactcagctccctgaaagggcaatatttcaaattaaacagtacaattcagttagctgtggagtctctgagtggcagctggaagaagcacaagtattctgggcaaaaaaggagcagagtcttgccctgagtattctcaagcaaatgatcaagaagttggatgccagctgtgcagcgaacaatcccagcctaaaacttacatacacagaatgtctgagggtttgtggcaactggttagcagaaacgtgcttagaaaatcctgcggtcatcatgcagacctatctagaaaaggcagtagaagttgctggaaattatgatggagaaagtagtgatgagctaagaaatggaaaaatgaaggcatttctctcattagcccggttttcagatactcaataccaaagaattgaaaactacatgaaatcatcggaatttgaaaacaagcaagctctcctgaaaagagccaaagaggaagtaggtctccttagggaacataaaattcagacaaacagatacacagtaaaggttcagcgagagctggagttggatgaattagccctgcgtgcactgaaagaggatcgtaaacgcttcttatgtaaagcagttgaaaattatatcaactgcttattaagtggagaagaacatgatatgtgggtattccggctttgttccctctggcttgaaaattctggagtttctgaagtcaatggcatgatgaagagagacggaatgaagattccaacatataaatttttgcctcttatgtaccaattggctgctagaatggggaccaagatgatgggaggcctaggatttcatgaagtcctcaataatctaatctctagaatttcaatggatcacccccatcacactttgtttattatactggccttagcaaatgcaaacagagatgaatttctgactaaaccagaggtagccagaagaagcagaataactaaaaatgtgcctaaacaaagctctcagcttgatgaggatcgaacagaggctgcaaatagaataatatgtactatcagaagtaggagacctcagatggtcagaagtgttgaggcactttgtgatgcttatattatattagcaaacttagatgccactcagtggaagactcagagaaaaggcataaatattccagcagaccagccaattactaaacttaagaatttagaagatgttgttgtccctactatggaaattaaggtggaccacacaggagaatatggaaatctggtgactatacagtcatttaaagcagaatttcgcttagcaggaggtgtaaatttaccaaaaataatagattgtgtaggttccgatggcaaggagaggagacagcttgttaagggccgtgatgacctgagacaagatgctgtcatgcaacaggtcttccagatgtgtaatacattactgcagagaaacacggaaactaggaagaggaaattaactatctgtacttataaggtggttcccctctctcagcgaagtggtgttcttgaatggtgcacaggaactgtccccattggtgaatttcttgttaacaatgaagatggtgctcataaaagatacaggccaaatgatttcagtgcctttcagtgccaaaagaaaatgatggaggtgcaaaaaaagtcttttgaagagaaatatgaagtcttcatggatgtttgccaaaattttcaaccagttttccgttacttctgcatggaaaaattcttggatccagctatttggtttgagaagcgattggcttatacgcgcagtgtagctacttcttctattgttggttacatacttggacttggtgatagacatgtacagaatatcttgataaatgagcagtcagcagaacttgtacatatagatctaggtgttgcttttgaacagggcaaaatccttcctactcctgagacagttccttttagactcaccagagatattgtggatggcatgggcattacgggtgttgaaggtgtcttcagaagatgctgtgagaaaaccatggaagtgatgagaaactctcaggaaactctgttaaccattgtagaggtccttctatatgatccactctttgactggaccatgaatcctttgaaagctttgtatttacagcagaggccggaagatgaaactgagcttcaccctactctgaatgcagatgaccaagaatgcaaacgaaatctcagtgatattgaccagagtttcaacaaagtagctgaacgtgtcttaatgagactacaagagaaactgaaaggagtggaagaaggcactgtgctcagtgttggtggacaagtgaatttgctcatacagcaggccatagaccccaaaaatctcagccgacttttcccaggatggaaagcttgggtgtgatcttcagtatatgaattaccctttcattcagcctttagaaattatattttagcctttatttttaacctgccaacatactttaagtagggattaatatttaagtgaactattgtgggtttttttgaatgttggttttaatacttgatttaatcaccactcaaaaatgttttgatggtcttaaggaacatctctgctttcactctttagaaataatggtcattcgggctgggcgcagcggctcacgcctgtaatcccagcactttgggaggccgaggtgagcggatcacaaggtcaggagttcgagaccagcctggccaagagaccagcctggccagtatggtgaaaccctgtctctactaaaaatacaaaaattagccgagcatggtggcgggcacctgtagtcccagctactcgagaggctgaggcaggagaatctcttgaacctgggaggtgaaggttgctgtgggccaaaatcatgccattgcactccagcctgggtgacaagagcgaaactccatctcaaaaa

SEQ ID NO: 1296 - DNA, 1216 bp, Homo sapiens
ttcggcacttgggagaagatgtttgaaaaaactgactctgctaatgagcctggactcagagctcaagtctgaactctacctccagacagaatgaagttcatctcgacatctctgcttctcatgctgctggtcagcagcctctctccagtccaaggtgttctggaggtctattacacaagcttgaggtgtagatgtgtccaagagagctcagtctttatccctagacgcttcattgatcgaattcaaatcttgccccgtgggaatggttgtccaagaaaagaaatcatagtctggaagaagaacaagtcaattgtgtgtgtggaccctcaagctgaatggatacaaagaatgatggaagtattgagaaaaagaagttcttcaactctaccagttccagtgtttaagagaaagattccctgatgctgatatttccactaagaacacctgcattcttcccttatccctgctctggattttagttttgtgcttagttaaatcttttccagggagaaagaacttccccatacaaataaggcatgaggactatgtgaaaaataaccttgcaggagctgatggggcaaactcaagcttcttcactcacagcaccctatatacacttggagtttgcattcttattcatcagggaggaaagtttctttgaaaatagttattcagttataagtaatacaggattattttgattatatacttgttgtttaatgtttaaaatttcttagaaaacaatggaatgagaatttaagcctcaaatttgaacatgtggcttgaattaagaagaaaattatggcatatattaaaagcaggcttctatgaaagactcaaaaagctgcctgggaggcagatggaacttgagcctgtcaagaggcaaaggaatccatgtagtagatatcctctgcttaaaaactcactacggaggagaattaagtcctacttttaaagaatttctttataaaatttactgtctaagattaatagcattcgaagatccccagacttcatagaatactcagggaaagcatttaaagggtgatgtacacatgtatcctttcacacatttgccttgacaaacttctttcactcacatctttttcactgactttttttgtgggggcggggccggggggactctggtatctaattctttaatgattcctataaatctaatgacattcaataaagttgagcaaacattttactt

SEQ ID NO: 1297 - DNA, 2565 bp, Homo sapiens
ccgggaaagtgatgtgggtaggacaggcggggcgagccgcaggtgccagaacacagattgtataaaaggctgggggctggtggggagcaggggaagggaatgtgaccaggtctaggtctggagtttcagcttggacactgagccaagcagacaagcaaagcaagccaggacacaccatcctgccccaggcccagcttctctcctgccttccaacgccatggggagcaatctcagcccccaactctgcctgatgccctttatcttgggcctcttgtctggaggtgtgaccaccactccatggtctttggcccagccccagggatcctgctctctggagggggtagagatcaaaggcggctccttccgacttctccaagagggccaggcactggagtacgtgtgtccttctggcttctacccgtaccctgtgcagacacgtacctgcagatctacggggtcctggagcaccctgaagactcaagaccaaaagactgtcaggaaggcagagtgcagagcaatccactgtccaagaccacacgacttcgagaacggggaatactggccccggtctccctactacaatgtgagtgatgagatctctttccactgctatgacggttacactctccggggctctgccaatcgcacctgccaagtgaatggccggtggagtgggcagacagcgatctgtgacaacggagcggggtactgctccaacccgggcatccccattggcacaaggaaggtgggcagccagtaccgccttgaagacagcgtcacctaccactgcagccgggggcttaccctgcgtggctcccagcggcgaacgtgtcaggaaggtggctcttggagcgggacggagccttcctgccaagactccttcatgtacgacacccctcaagaggtggccgaagctttcctgtcttccctgacagagaccatagaaggagtcgatgctgaggatgggcacggcccaggggaacaacagaagcggaagatcgtcctggacccttcaggctccatgaacatctacctggtgctagatggatcagacagcattggggccagcaacttcacaggagccaaaaagtgtctagtcaacttaattgagaaggtggcaagttatggtgtgaagccaagatatggtctagtgacatatgccacataccccaaaatttgggtcaaagtgtctgaagcagacagcagtaatgcagactgggtcacgaagcagctcaatgaaatcaattatgaagaccacaagttgaagtcagggactaacaccaagaaggccctccaggcagtgtacagcatgatgagctggccagatgacgtccctcctgaaggctggaaccgcacccgccatgtcatcatcctcatgactgatggattgcacaacatgggcggggacccaattactgtcattgatgagatccgggacttgctatacattggcaaggatcgcaaaaacccaagggaggattatctggatgtctatgtgtttggggtcgggcctttggtgaaccaagtgaacatcaatgctttggcttccaagaaagacaatgagcaacatgtgttcaaagtcaaggatatggaaaacctggaagatgttttctaccaaatgatcgatgaaagccagtctctgagtctctgtggcatggtttgggaacacaggaagggtaccgattaccacaagcaaccatggcaggccaagatctcagtcattcgcccttcaaagggacacgagagctgtatgggggctgtggtgtctgagtactttgtgctgacagcagcacattgtttcactgtggatgacaaggaacactcaatcaaggtcagcgtaggaggggagaagcgggacctggagatagaagtagtcctatttcaccccaactacaacattaatgggaaaaaagaagcaggaattcctgaattttatgactatgacgttgccctgatcaagctcaagaataagctgaaatatggccagactatcaggcccatttgtctcccctgcaccgagggaacaactcgagctttgaggcttcctccaactaccacttgccagcaacaaaaggaagagctgctccctgcacaggatatcaaagctctgtttgtgtctgaggaggagaaaaagctgactcggaaggaggtctacatcaagaatggggataagaaaggcagctgtgagagagatgctcaatatgccccaggctatgacaaagtcaaggacatctcagaggtggtcacccctcggttcctttgtactggaggagtgagtccctatgctgaccccaatacttgcagaggtgattctggcggccccttgatagttcacaagagaagtcgtttcattcaagttggtgtaatcagctggggagtagtggatgtctgcaaaaaccagaagcggcaaaagcaggtacctgctcacgcccgagactttcacatcaacctctttcaagtgctgccctggctgaaggagaaactccaagatgaggatttgggttttctataaggggtttcctgctggacaggggcgtgggattgaattaaaacagctgcgacaac

SEQ ID NO: 1298 - DNA, 5417 bp, Homo sapiens
agaaggtagcagacagacagacggatctaacctctcttggatcctccagccatgaggctgctctgggggctgatctgggcatccagcttcttcaccttatctctgcagaagcccaggttgctcttgttctctccttctgtggttcatctgggggtccccctatcggtgggggtgcagctccaggatgtgccccgaggacaggtagtgaaaggatcagtgttcctgagaaacccatctcgtaataatgtcccctgctccccaaaggtggacttcacccttagctcagaaagagacttcgcactcctcagtctccaggtgcccttgaaagatgcgaagagctgtggcctccatcaactcctcagaggccctgaggtccagctggtggcccattcgccatggctaaaggactctctgtccagaacgacaaacatccagggtatcaacctgctcttctcctctcgccgggggcacctctttttgcagacggaccagcccatttacaaccctggccagcgggttcggtaccgggtctttgctctggatcagaagatgcgcccgagcactgacaccatcacagtcatggtggagaactctcacggcctccgcgtgcggaagaaggaggtgtacatgccctcgtccatcttccaggatgactttgtgatcccagacatctcagagccagggacctggaagatctcagcccgattctcagatggcctggaatccaacagcagcacccagtttgaggtgaagaaatatgtccttcccaactttgaggtgaagatcacccctggaaagccctacatcctgacggtgccaggccatcttgatgaaatgcagttagacatccaggccaggtacatctatgggaagccagtgcagggggtggcatatgtgcgctttgggctcctagatgaggatggtaagaagactttctttcgggggctggagagtcagaccaagctggtgaatggacagagccacatttccctctcaaaggcagagttccaggacgccctggagaagctgaatatgggcattactgacctccaggggctgcgcctctacgttgctgcagccatcattgagtctccaggtggggagatggaggaggcagagctcacatcctggtattttgtgtcatctcccttctccttggatcttagcaagaccaagcgacaccttgtgcctggggcccccttcctgctgcaggccttggtccgtgagatgtcaggctccccagcttctggcattcctgtcaaagtttctgccacggtgtcttctcctgggtctgttcctgaagcccaggacattcagcaaaacacagacgggagcggccaagtcagcattccaataattatccctcagaccatctcagagctgcagctctcagtatctgcaggctccccacatccagcgatagccaggctcactgtggcagccccaccttcaggaggccccgggtttctgtctattgagcggccggattctcgacctcctcgtgttggggacactctgaacctgaacttgcgagccgtgggcagtggggccaccttttctcattactactacatgatcctatcccgagggcagatcgtgttcatgaatcgagagcccaagaggaccctgacctcggtctcggtgtttgtggaccatcacctggcaccctccttctactttgtggccttctactaccatggagaccacccagtggccaactccctgcgagtggatgtccaggctggggcctgcgagggcaagctggagctcagcgtggacggtgccaagcagtaccggaacggggagtccgtgaagctccacttagaaaccgactccctagccctggtggcgctgggagccttggacacagctctgtatgctgcaggcagcaagtcccacaagcccctcaacatgggcaaggtctttgaagctatgaacagctatgacctcggctgtggtcctgggggtggggacagtgcccttcaggtgttccaggcagcgggcctggccttttctgatggagaccagtggaccttatccagaaagagactaagctgtcccaaggagaagacaacccggaaaaagagaaacgtgaacttccaaaaggcgattaatgagaaattgggtcagtatgcttccccgacagccaagcgctgctgccaggatggggtgacacgtctgcccatgatgcgttcctgcgagcagcgggcagcccgcgtgcagcagccggactgccgggagcccttcctgtcctgctgccaatttgctgagagtctgcgcaagaagagcagggacaagggccaggcgggcctccaacgagccctggagatcctgcaggaggaggacctgattgatgaggatgacattcccgtgcgcagcttcttcccagagaactggctctggagagtggaaacagtggaccgctttcaaatattgacactgtggctccccgactctctgaccacgtgggagatccatggcctgagcctgtccaaaaccaaaggcctatgtgtggccaccccagtccagctccgggtgttccgcgagttccacctgcacctccgcctgcccatgtctgtccgccgctttgagcagctggagctgcggcctgtcctctataactacctggataaaaacctgactgtgagcgtccacgtgtccccagtggaggggctgtgcctggctgggggcggagggctggcccagcaggtgctggtgcctgcgggctctgcccggcctgttgccttctctgtggtgcccacggcagccgccgctgtgtctctgaaggtggtggctcgagggtccttcgaattccctgtgggagatgcggtgtccaaggttctgcagattgagaaggaaggggccatccatagagaggagctggtctatgaactcaaccccttggaccaccgaggccggaccttggaaatacctggcaactctgatcccaatatgatccctgatggggactttaacagctacgtcagggttacagcctcagatccattggacactttaggctctgagggggccttgtcaccaggaggcgtggcctccctcttgaggcttcctcgaggctgtggggagcaaaccatgatctacttggctccgacactggctgcttcccgctacctggacaagacagagcagtggagcacactgcctcccgagaccaaggaccacgccgtggatctgatccagaaaggctacatgcggatccagcagtttcggaaggcggatggttcctatgcggcttggttgtcacgggacagcagcacctggctcacagcctttgtgttgaaggtcctgagtttggcccaggagcaggtaggaggctcgcctgagaaactgcaggagacatctaactggcttctgtcccagcagcaggctgacggctcgttccaggacccctgtccagtgttagacaggagcatgcaggggggtttggtgggcaatgatgagactgtggcactcacagcctttgtgaccatcgcccttcatcatgggctggccgtcttccaggatgagggtgcagagccattgaagcagagagtggaagcctccatctcaaaggcaaactcatttttgggggagaaagcaagtgctgggctcctgggtgcccacgcagctgccatcacggcctatgccctgtcactgaccaaggcgcctgtggacctgctcggtgttgcccacaacaacctcatggcaatggcccaggagactggagataacctgtactggggctcagtcactggttctcagagcaatgccgtgtcgcccaccccggctcctcgcaacccatccgaccccatgccccaggccccagccctgtggattgaaaccacagcctacgccctgctgcacctcctgcttcacgagggcaaagcagagatggcagaccaggcttcggcctggctcacccgtcagggcagcttccaagggggattccgcagtacccaagacacggtgattgccctggatgccctgtctgcctactggattgcctcccacaccactgaggagaggggtctcaatgtgactctcagctccacaggccggaatgggttcaagtcccacgcgctgcagctgaacaaccgccagattcgcggcctggaggaggagctgcagttttccttgggcagcaagatcaatgtgaaggtgggaggaaacagcaaaggaaccctgaaggtccttcgtacctacaatgtcctggacatgaagaacacgacctgccaggacctacagatagaagtgacagtcaaaggccacgtcgagtacacgatggaagcaaacgaggactatgagtacgatgagcttccagccaaggatgacccagatgcccctctgcagcccgtgacacccctgcagctgtttgagggtcggaggaaccgccgcaggagggaggcgcccaaggtggtggaggagcaggagtccagggtgcactacaccgtgtgcatctggcggaacggcaaggtggggctgtctggcatggccatcgcggacgtcaccctcctgagtggattccacgccctgcgtgctgacctggagaagctgacctccctctctgaccgttacgtgagtcactttgagaccgaggggccccacgtcctgctgtattttgactcggtccccacctcccgggagtgcgtgggctttgaggctgtgcaggaagtgccggtggggctggtgcagccggccagcgcaaccctgtacgactactacaaccccgagcgcagatgttctgtgttttacggggcaccaagtaagagcagactcttggccaccttgtgttctgctgaagtctgccagtgtgctgaggggaagtgccctcgccagcgtcgcgccctggagcggggtctgcaggacgaggatggctacaggatgaagtttgcctgctactacccccgtgtggagtacggcttccaggttaaggttctccgagaagacagcagagctgctttccgcctctttgagaccaagatcacccaagtcctgcacttcaccaaggatgtcaaggccgctgctaatcagatgcgcaacttcctggttcgagcctcctgccgccttcgcttggaacctgggaaagaatatttgatcatgggtctggatggggccacctatgacctcgagggacacccccagtacctgctggactcgaatagctggatcgaggagatgccctctgaacgcctgtgccggagcacccgccagcgggcagcctgtgcccagctcaacgacttcctccaggagtatggcactcaggggtgccaggtgtgagggctgccctcccacctccgctgggaggaacctgaacctgggaaccatgaagctggaagcactgctgtgtccgctttcatgaacacagcctgggaccagggcatattaaaggcttttggcagcaaagtgtcagtgttggc

SEQ ID NO: 1299 - DNA, 1793 bp, Homo sapiens
cgcgtccgccccgcgagcacagagcctcgcctttgccgatccgccgcccgtccacacccgccgccagctcaccatggatgatgatatcgccgcgctcgtcgtcgacaacggctccggcatgtgcaaggccggcttcgcgggcgacgatgccccccgggccgtcttcccctccatcgtggggcgccccaggcaccagggcgtgatggtgggcatgggtcagaaggattcctatgtgggcgacgaggcccagagcaagagaggcatcctcaccctgaagtaccccatcgagcacggcatcgtcaccaactgggacgacatggagaaaatctggcaccacaccttctacaatgagctgcgtgtggctcccgaggagcaccccgtgctgctgaccgaggcccccctgaaccccaaggccaaccgcgagaagatgacccagatcatgtttgagaccttcaacaccccagccatgtacgttgctatccaggctgtgctatccctgtacgcctctggccgtaccactggcatcgtgatggactccggtgacggggtcacccacactgtgcccatctacgaggggtatgccctcccccatgccatcctgcgtctggacctggctggccgggacctgactgactacctcatgaagatcctcaccgagcgcggctacagcttcaccaccacggccgagcgggaaatcgtgcgtgacattaaggagaagctgtgctacgtcgccctggacttcgagcaagagatggccacggctgcttccagctcctccctggagaagagctacgagctgcctgacggccaggtcatcaccattggcaatgagcggttccgctgccctgaggcactcttccagccttccttcctgggcatggagtcctgtggcatccacgaaactaccttcaactccatcatgaagtgtgacgtggacatccgcaaagacctgtacgccaacacagtgctgtctggcggcaccaccatgtaccctggcattgccgacaggatgcagaaggagatcactgccctggcacccagcacaatgaagatcaagatcattgctcctcctgagcgcaagtactccgtgtggatcggcggctccatcctggcctcgctgtccaccttccagcagatgtggatcagcaagcaggagtatgacgagtccggcccctccatcgtccaccgcaaatgcttctaggcggactatgacttagttgcgttacaccctttcttgacaaaacctaacttgcgcagaaaacaagatgagattggcatggctttatttgttttttttgttttgttttggttttttttttttttttggcttgactcaggatttaaaaactggaacggtgaaggtgacagcagtcggttggagcgagcatcccccaaagttcacaatgtggccgaggactttgattgcacattgttgtttttttaatagtcattccaaatatgagatgcattgttacaggaagtcccttgccatcctaaaagccaccccacttctctctaaggagaatggcccagtcctctcccaagtccacacaggggaggtgatagcattgctttcgtgtaaattatgtaatgcaaaatttttttaatcttcgccttaatacttttttattttgttttattttgaatgatgagccttcgtgcccccccttccccctttttgtcccccaacttgagatgtatgaaggcttttggtctccctgggagtgggtggaggcagccagggcttacctgtacactgacttgagaccagttgaataaaagtgcacacctta

SEQ ID NO: 1300 - DNA, 952 bp, Homo sapiens
tgaactctggatgctgttagcctgagactcaggaagacaacttctgcagggtcactccctggcttctggaggaaagagaaggagggcagtgctccagtggtacagaagtgagacataatggaatcaggcttcacctccaaggacacctatctaagccattttaaccctcgggattacctagaaaaatattacaagtttggttctaggcactctgcagaaagccagattcttaagcaccttctgaaaaatcttttcaagatattctgcctagacggtgtgaagggagacctgctgattgacatcggctctggccccactatctatcagctcctctctgcttgtgaatcctttaaggagatcgtcgtcactgactactcagaccagaacctgcaggagctggagaagtggctgaagaaagagccagaggcctttgactggtccccagtggtgacctatgtgtgtgatcttgaagggaacagagtcaagggtccagagaaggaggagaagttgagacaggcggtcaagcaggtgctgaagtgtgatgtgactcagagccagccactgggggccgtccccttacccccggctgactgcgtgctcagcacactgtgtctggatgccgcctgcccagacctccccacctactgcagggcgctcaggaacctcggcagcctactgaagccagggggcttcctggtgatcatggatgcgctcaagagcagctactacatgattggtgagcagaagttctccagcctccccctgggccgggaggcagtagaggctgctgtgaaagaggctggctacacaatcgaatggtttgaggtgatctcgcaaagttattcttccaccatggccaacaacgaaggacttttctccctggtggcgaggaagctgagcagacccctgtgatgcctgtgacctcaattaaagcaattcctttgacctgtca

SEQ ID NO: 1301 - DNA, 538 bp, Homo sapiens
agggagagagggaggggaggaaattggagaccccagcacccccttgctcactctcttgctcacagtccacgatggcccggtccctggtgtgccttggtgtcatcatcttgctgtctgccttctccggacctggtgtcaggggtggtcctatgcccaagctggctgaccggaagctgtgtgcggaccaggagtgcagccaccctatctccatggctgtggcccttcaggactacatggcccccgactgccgattcctgaccattcaccggggccaagtggtgtatgtcttctccaagctgaagggccgtgggcggctcttctggggaggcagcgttcagggagattactatggagatctggctgctcgcctgggctatttccccagtagcattgtccgagaggaccagaccctgaaacctggcaaagtcgatgtgaagacagacaaatgggatttctactgccagtgagctcagcctaccgctggccctgccgtttcccctccttgggtttatgcaaatacaatcagcccagtgcaaac

SEQ ID NO: 1302 - DNA, 3859 bp, Homo sapiens
ttgtgtcgccatggcggcggcagcggcgacgagaacggcgagcgaggggtcgagcgcggccggggcctgaggaggctacgcgaccatggtggcacgcagcactgacagcctggatggcccaggggagggctcggtgcagcctctacccactgctggggggcccagtgtgaaggggaagcctgggaagaggctctcagctcctcgaggccccttcccgcggctggctgactgcgcccatttccactacgagaacgttgactttggccacattcagctcctgctgtctccagaccgtgaagggcccagcctctctggagagaatgagctggtgttcggggtgcaggtgacctgtcagggccgttcctggccggttctccggagttacgatgactttcgttccctggatgcccacctccaccggtgcatatttgaccggaggttctcctgccttccggagcttcccccgccccccgagggtgccagggctgcccagatgctggtgccactgctgctgcagtacctggagacactgtcaggactggtggacagtaacctcaactgcgggcctgtgctcacctggatggagctggacaatcacggccggcgactgctcctcagtgaggaggcgtcactcaatatccctgcagtggcggccgcccatgtgatcaaacggtatacagcccaggcgccagatgagctgtcctttgaggtgggagacattgtctcggtgatcgacatgccacccacagaggatcggagctggtggcggggcaagcgaggcttccaggtcgggttcttccccagtgagtgtgtggaactcttcacagagcggccaggtccgggcctgaaggcggatgccgatggccccccatgtggcatcccggctccccagggtatctcgtctctgacctcagctgtgccacggcctcgtgggaagctggccggcctgctccgcaccttcatgcgctcccgcccttctcggcagcggctgcggcagcggggaatcctgcgacagagggtgtttggctgcgatcttggcgagcacctcagcaactcaggccaggatgtgccccaggtgctgcgctgctgctccgagttcattgaggcccacggggtggtggatgggatctaccggctctcaggcgtgtcttccaacatccagaggcttcggcacgagtttgacagtgagaggatcccggagctgtctggccctgcattcctgcaggacatccacagcgtgtcctccctctgcaagctctacttccgagagcttccgaaccctctgctcacctaccagctctatgggaagttcagtgaggccatgtcagtgcctggggaggaggagcgtctggtgcgggtgcacgatgtcatccagcagctgcccccaccacattacaggaccctggagtacctgctgaggcacctggcccgcatggcgagacacagtgccaacaccagcatgcatgcccgcaacctggccattgtctgggcacccaacctgctacggtccatggagctggagtcagtgggaatgggtggcgcggcggcgttccgggaagttcgggtgcagtcggtggtggtggagtttctgctcacccatgtggacgtcctgttcagcgacaccttcacctccgccggcctcgaccctgcaggccgctgcctgctccccaggcccaagtcccttgcgggcagctgcccctccacccgcctgctgacgctggaggaagcccaggcacgcacccagggccggctggggacgcccacggagcccacaactcccaaggccccggcctcacctgcggaaaggaggaaaggggagagaggggagaagcagcggaagccagggggcagcagctggaagacgttctttgcactgggccggggccccagtgtccctcgaaagaagcccctgccctggctggggggcacccgtgccccaccgcagccttcaggcagcagacccgacaccgtcacactgagatctgccaagagcgaggagtctctgtcatcgcaggccagcggggctgaactgctgggggctgggggagcacctgcctcagccaccccaacaccagctctcagccccggccggagcctgcgcccccatctcatacccctgctgctgcgaggagccgaggccccgctgactgacgcctgccagcaggagatgtgcagcaagctccggggagcccagggcccactcggtcctgatatggagtcaccactgccaccccctcccctgtctctcctgcgccctgggggtgccccacccccgccccctaagaacccagcacgcctcatggccctggccctggctgagcgggctcagcaggtggccgagcaacagagccagcaggagtgtgggggcaccccacctgcttcccaatcccccttccaccgctcgctgtctctggaggtgggcggggagcccctggggacctcagggagtgggccacctcccaactccctagcacacccgggtgcctgggtcccgggacccccaccctacttaccaaggcaacaaagtgatgggagcctgctgaggagccagcggcccatggggacctcaaggaggggactccgaggccctgcccaggtcagtgcccagctcagggcaggtggcgggggcagggatgcgccagaggcagcagcccagtccccatgttctgtcccctcacaggttcctacccccggcttcttctccccagcccccagggagtgcctgccacccttcctcggggtccccaagccaggcttgtaccccctgggccccccatccttccagcccagttccccagccccagtctggaggagctctctgggcccccctgcaccactcgacaggggagagaacctgtactatgagatcggggcaagtgaggggtccccctattctggccccacccgctcctggagtccctttcgctccatgccccccgacaggctcaatgcctcctacggcatgcttggccaatcacccccactccacaggtcccccgacttcctgctcagctacccgccagccccctcctgctttccccctgaccaccttggctactcagccccccagcaccctgctcggcgccctacaccgcctgagcccctctacgtcaacctagctctagggcccaggggtccctcacctgcctcttcctcctcctcttcccctcctgcccacccccgaagccgttcagatcccggtcccccagtcccccgccttccccagaaacaacgggcaccctggggaccccgtacccctcatagggtgccgggtccctggggccctcctgagcctctcctgctctacagggcagccccgccagcctacggaagggggggcgagctccaccgagggtccttgtacagaaatggagggcaaagaggggagggggctggtcccccacccccttaccccactcccagctggtccctccactctgagggccagacccgaagctactgctgagcaccagctgggaggggccgtccttccttcccttcaccctcactggatcttggcccaaccaaatcccttgttttgtattttcttgaaccccgaccactaccccaggtttctaactttgtaacttgcttctgatgtgggtccctaacctataatctcagcttccctaccctggactgaagggtctgcccatccccccaccaccctccatcctgggggccctcgcacaaatctggggtgggaggggctaggctgaccccatcctcctctccctccaggagcccccagcatgtcctgacctgtgcacggggatggggggacaactcctacccttctttccccacatgccccactaaaccatctgacaacattaatgaataaaatggtgaaaatgtg

SEQ ID NO: 1303 - DNA, 1718 bp, Homo sapiens
atgttccttcttctggtgcttctcactggacttggtgggatgcatgcagacctcaatcctcataaaatcttcctgcagaccacaattccagagaagatttcatcatcggatgcaaaaacagatccagaacataatgttatttacatgattaccatagggaaagccatattttgtccatctcaaaaagcaatcaattttatcttcagcttctgttattaattcttatgacgaaaatgacatccgtcattccaaacctctgctagttcagatggattgcaattataatggatatgttgcgggtattccaaattctcttgtgactctcagcgtatgttcaggactcaggggaacaatgcagctgaaaaacatctcatatggaattgaaccgatggaggctgtatcaggatttatacacaagatttatgaagaaaaatatgctgacactaatattctcttagaagaaaatgacacttatacttggtttaattcagagtatcaagtcagaaaaagttcagaaaaaactgactttattaagttattccctcgatatattgaaatgcatattgttgtggacaaaaatttggtactctggtggtgtaaaggattttaacatctgtagcttggatgactttaaatatatttcttctcataatggccttacatgtcttcagacaaaccctcttgaaatgccaacctacacacacaggagaatatgtggcaatgggttgttggaaggaagtgaagaatgtgactgtggcactaaagacttcaaaccggctaatatgatttgtaggaaatcagttggtaaagaatgcgatttcactgaatattgcaatggggaccttccatactgtttgcctgacacttatgtacgtgatggagaatattgtgattcaggtggagccttctgttttcaaggaaagtgtcggacttttgacaaacaatgtgatgatttaattggaagaggttcaagaggtgctccggttttctgttatgatgaaattaataccagaggagacaattttggaaactgtggcactgcacactgtctttttcaacatattctatgtggaaaattagtctgtacatgggaacacagagacttaatatcacgtccaaatttatctgtgatttatgcacatgtacgagaccaaacatgtgtgtctacatacctacccaggaggacgccacctccagtaaattcacctatttcaatcacatcatattattcagctgaagacagagatgaaacatttgtacaagatggttccatgtgtggtcctgatatgtattgtttcgaaatgcattgtaaacatgttagattcctgatgaatttaaaattgtgtgatgcttctaatcattgtgatcgtcatggagtttgcaacaattttaaccattgccattgtgaaaagggatataatcctccttactgccaaccaaagcaaggagcatttggaagtattgatgatggacgcttagtaccaccaactgagagaagttacatggaggagggaagataggccacttttcaaaaacaacggtttcaactcattttctacatttctctacctgtgcttcttattactactgccattttaataaaacagaaaaaattgagagagctatgctatagaggggaaaatgaaagtgagagctctgtgtcagaagaaagcagcagtaacagcaagtcatccctcagtgaaagcaccagtctctaa

SEQ ID NO: 1304 - DNA, 2787 bp, Homo sapiens
gcacagacgagatctcgatcgaaggcgagatggcggacgtgctagatcttcacgaggctgggggcgaagatttcgccatggatgaggatggggacgagagcattcacaaactgaaagaaaaagcgaagaaacggaagggtcgcggctttggctccgaagaggggtcccgagcgcggatgcgtgaggattatgacagcgtggagcaggatggcgatgaacccggaccacaacgctctgttgaaggctggattctctttgtaactggagtccatgaggaagccaccgaagaagacatacacgacaaattcgcagaatatggggaaattaaaaacattcatctcaacctcgacaggcgaacaggatatctgaaggggtatactctagttgaatatgaaacatacaaggaagcccaggctgctatggagggactcaatggccaggatttgatgggacagcccatcagcgttgactggtgttttgttcggggtccaccaaaaggcaagaggagaggtggccgaagacgcagcagaagtccagaccggagacgtcgctgacaggtcctctgttgtccaggtgttctcttcaagattccatttgaccatgcagccttggacaaataggactggggtggaacttgctgtgtttatatttaatctcttaccgtatatgcgtagtatttgagttgcgaataaatgttccatttttgttttctacatttaatgttactttcctgtcctaaaattgaaagttctaaagcatagcaaggctgtatggatcattgtgaagatacttctagggactgaactctatgtatttcttttttttcttttttttgagatagagtcttgctgtgttacccagggtggattgcagctgatcatagctcactgcagcttcaaactcttgggctcaagccatccttctgcctcactgtccctagtagttgggattacaggcacatgccaccatgcccagctaaatttttaatatttttgtagagatggggtcttgctgtgttacctgggctagttatgtgagtttctatattagacatagtctcaagtttcaggtagggtttaaagtagagacactggtcagtatttcttttttggggggaactaggagagcaggagtagaagtgagatgttaagatcttatggcactaaagacttactattctgttcctacatactctgttaggatcagatagatgttatagaaatgccttttgtttctcctgcccttcttgatgtcacagttttttgtacttccagctgtctaaaggcatgaatctcctcttggagcattctcccagacccttctttagaagagtctatactaagttcttggtgccctcttcggcagccaagggtgaaggccccatagaggagaggatccaaaggagcattgaggaggcccaagaggaaaaggatgtggctcaggctgggagggacttcagttagcatggtgggggagaaccagtaccacatacccagtaggtaataaggtgtccagcagaggatgaaggtcagcaagataagcagggccagtctcagggcccggagacgaacacggggacaattgtcaaaggagcgggggagggcaaattcaccagcaggggctaggaatttagaaaatatactgtaattcagacactcagcttctgatctgagtatagggtgaattgatggaggggcatagctagtgagacagagctcgcctcctacaaggaggagaatgttgcaaaccgttttccccttcccaacctgggactatatgatttcttacccccagggattatgatagaaatatgaagccaccaagtctagacttgatggtgttcaagaataaataatactgattgcctccctagtccttgtccagctaactcagctgtttataattgaagggattcaacaaaattatctctagcatcaggtgctagacatggttagaatctcaccatggtttagtgactggtagatagctattaggtaggtagataaataaatgatgctagaggcaacaggtctagggttaaggattaaggcctgggaattggagtctcaccatggctccccttccttgtctggggcctggacacactgaggacaatgcggctatagcagatggccatggcagtcagtggcagcagaaagaggcagcagaaggtgaagaggttataggtggtctcttgccattgagccttgaagctgcctttggtgacacactgagtgaaagggactgggccagctcagtggaccgtgtggaacaggaacagctggagtggagttgaggactattagaactggttcccctcaccacccaacctacccacctatgtcatactgtctcctcccaattcatccttaattccaagtgaagcagcacagtgctgagaaacagttcatccatggtgccatgttaaagaagttggaaatatatcttgaaaatcctatcttccttttaggcttgaatatgatgctgaacagtaagtttgttaaatcttggaacttaaaacaatcctgctttctcaagtactattctaacattgcgctttataagggatgatatttctaccacctcactcatatttttagctgaaatgattttcctggtatgtctgttattttgtggaaaaagaaatattgtgtaaaatgggtgctgccaaaattccaggccattttgcagggactctgaagtgacctttagtagtaatagtcttatgtgcagtaactataatggtaaagaatgttaaataataaaatttaacattttccaaatgct

SEQ ID NO: 1305 - DNA, 4221 bp, Homo sapiens
gtcggccgtcccctttaatttttaaatacacggtcccctcttttctctggggggggcaagcaagaaatcaaagaaggaggagacaagccgtcaattttctccaaaacaaaccccaccgggcaatttggtctcggggtagggggagacggggtgattgcaaattattccaggacgagatccagttctccagcgggaaaggggcaaaggaacgccgcgcgttggaagggccagggtacgcagctccccttgcagcgcccgcaggacccccgcaagctcgtgccggcgaaatcggagaccgccgatctgtcctcgttctctcctgcacgtctggctgcattcggaggaagacctggggcgcgagcgagcggcgacagcatgagcctgtgctgacctccgcgcggcgggccgagcccagggctttgtcgcggtacctgcgcccagcccgcgccgcaactctgtgcccagcttttgcaatcttttgttgcagcgctgaccgcaccaagttaaatgctcccttgcaatttttcttttttttgtttgtttgtttaatttttggagagctcgcgatcttggaaaagcctcagacgccatctacagttaaaacgtaggtaactgccctctcccgcaccccccccttacacgccccccaccctttccaccaaaaaaagggggtgcagcgcggattctggctgccgtgcgtcgccagccggtagacccgtgcttgtttcctttctctttttgtttggcttctaacgcgttgggactgagtcgccgccgtgagctccccgaagactgcacaaactaccgcgggctcctccgccccgtctgcgattcggaagccggcctgggggtcgcgtcgggagccctgcgctgcagctccgcaccttagcagcccgggtactcatccagatccacgccggggacacacacacagagtaactaaaagtgcggcgattctgcacatcgccgactgctttggggtaacaaaaagacccgagttgcctgccgaccgaggacccccgggagccgggctcggagcagacgaggtatccggcggcgcccatttgggggcttctaactctttctccacgcagcccctcttctgtcccctcccctctcgctcccttttaaaatcagtggcaccgaggcgcctgcagccgcactcgccagcgactcatctctccagcgggtttttttttgtttgtcgtgtgcgatcctcacactcatgaacatacacaggtctacccccatcacaatagcgagatatgggagatcgcggaacaaaacccaggatttcgaagagttgtcgtctataaggtccgcggagcccagccagagtttcagcccgaacctcggctccccgagcccgcccgagactccgaacttgtcgcattgcgtttcttgtatcgggaaatacttattgttggaacctctggagggagaccacgtttttcgtgccgtgcatctgcacagcggagaggagctggtgtgcaaggtgtttgatatcagctgctaccaggaatccctggcaccgtgcttttgcctgtctgctcatagtaacatcaaccaaatcactgaaattatcctgggtgagaccaaagcctatgtgttctttgagcgaagctatggggacatgcattccttcgtccgcacctgcaagaagctgagagaggaggaggcagccagactgttctaccagattgcctcggcagtggcccactgccatgacggggggctggtgctgcgggacctcaagctgcggaaattcatctttaaggacgaagagaggactcgggtcaagctggaaagcctggaagacgcctacattctgcggggagatgatgattccctctccgacaagcatggctgcccggcttacgtaagcccagagatcttgaacaccagtggcagctactcgggcaaagcagccgacgtgtggagcctgggggtgatgctgtacaccatgttggtggggcggtaccctttccatgacattgaacccagctccctcttcagcaagatccggcgtggccagttcaacattccagagactctgtcgcccaaggccaagtgcctcatccgaagcattctgcgtcgggagccctcagagcggctgacctcgcaggaaattctggaccatccttggttttctacagattttagcgtctcgaattcagcatatggtgctaaggaagtgtctgaccagctggtgccggacgtcaacatggaagagaacttggaccctttctttaactgagctcatgccccacggagacttagcaggttccaggagtgagcgagggcagcggaaaggagttcttccgggggacacgaattgcctggctgagtagcaagaaagacacactcttaagtttcttggttcagagcaggaaaaccttcaaggagctgactgaccacgtagcatgggggcaagaggcgtgggatggggattggggtgagatggatgggagcccgctggagcttgtcttccctaacatagcctgggagaccaccccttgccacttgggccacttccgcctaccccacttttcattttgttccaaaatagttgcagatcctgacagaatcaaaactctctgcctcaaacacacatcctggcatcgcactgttagcatttaacttcttgttaggattcagggaaggaacagttggccaagaattttttttcttttaaacaagccaaccacctagctggtaattaatgaggttcacttaaaaaaaaaattcggtgcacacagactgacatgaaacctgggtgctacagtaaaagaaaacaaaagtccagtttgtgtctcttaatcgctcacttcaactcatttcttctaaataaactatttaatatcctggtcaggaaatgacatgttaatgctttgctccctgaagggggaaaaaatctgtcctttaacaagctattctgttttgtgtcaattgggtccgtggcaaggaagctattaggaagtcaaacggtccaggatgcattacctgctaatccttaggtttaaagggggaaagaaaagggaagaagaaaggaaaagagaaatccaactcctttttcatgttttgcttttgaacaatgagggtttgtgtgacaggcattcctctttgctgagatgatagcaatggcctgagattttagcaagctcctggagtctgatgcttttgcagtactctgatcgcaactaaacatttgtctttgttttattagaaactagtgaaacaaagcaggttgtcccacatgtataaaatacagggcagctatttagttttctttacagagaatgatccttttaaggcttgtaaggccctctggtttggacaaaaaccctcagtagagacaagcgggaaggataattagctgaaagctatgatgatataaataaaaacagctctctatcccaatacgcacctttgtattttcaagaactcttctatttattaaggaaaatgtcacattgtgatgtattaagccagtacttcaattacgggttgacttgggatgacatattacatgctgtagttaacatttataattctttttccttgtttgagtatttctgtctctgaaataaccttttacttggcttttctagatagctttatttgatttcgagtggcaaaatgttttttattacggcttttctattgctgtatgatacagaactcttttggcataaatatttgtgttcccagtacctcacttgttcggatttgactgcctgtatatgttttgtgaaatggtcctgtttttgggtaggtgacacgtggactctagtatgtaaatgttacttgaatctgtgcttcataatagtgtgtggcatgtatgtgcagactcttggatgctttatgcctgcgcaccaggagccctgtcctcacgttcccaggagggcggcttcacccttcgtaaccaggagacaaggcggccatggatttgcccttgattctattttgctaatggaagatagaaaggagagaaggtttttttttttttttaacattctgaagatggtgctgtgtcaagaaggaccttttttttcccctctcccctattttttaagtaccttggaggaggagaggttggtgacatgcatggtggggatctatggcctctggtgctttgtcctgtatttggtttaatgtttttgtcctaatctcttcaatcaataaaattgtgcgtatttaactaaaaaaaaaaaaaaaaaa

SEQ ID NO: 1306 - DNA, 2484 bp, Homo sapiens
attcctcgttagggcaggcgcggccccttcggctccgagctgaccctgatcagggccgagttgtctcggcggcgctgccgaggcctccacccaggacagtccccctccccgggcctctctcctcttgcctacgagtcccctctcctcgtaggcctctcggatctgatatcgtggggtgaggtgagcaggcccggggagggtggttaccgctgaggagctgcagtctctgtcaagatgatagaggtactgacaacaactgactctcagaaactgctacaccagctgaatgccctgttggaacaggagtctagatgtcagccaaaggtctgtggtttgagactaattgagtctgcacacgataatggcctcagaatgactgcaagactaagggactttgaagtaaaagatcttcttagtctaactcagttctttggctttgacacagagacattttctctagctgtgaatttactggacagattcctgtctaaaatgaaggtacagcccaagcaccttgggtgtgttggactgagctgcttttatttggctgtaaaatcaatagaagaggaaaggaatgtcccattggcaactgacttgatccgaataagtcaatataggtttacggtttcagacttgatgagaatggaaaagattgtattggagaaggtgtgttggaaagtcaaagctactactgcctttcaatttctgcaactgtattattcactccttcaagagaacttgccacttgaaaggagaaatagcattaattttgaaagactagaagctcaactgaaggcatgtcattgcaggatcatattttctaaagcaaagccttctgtgttggcattgtctatcattgcattagagatccaagcacagaagtgtgtagagttaacagaaggaatagaatgtcttcagaaacattccaagataaatggcagagatctgaccttctggcaagagcttgtatccaaatgtttaactgaatattcatcaaataagtgttccaaaccaaatgttcagaagttgaaatggattgtttctgggcgtactgcacggcaattgaagcatagctactacagaataactcaccttccaacaattcctgaaatggtcccttaactggattattacagcaccaaaaaacttctctgaagcctttctccacaaccttgttctatggattccataatgttacaatggatttaagctatgaagcctcaaaacatcacgagataagcatgatggtctcagacttgggaaaactgcctaatattatgctgtagtggaattatgtttagatttgaattcatctgtgaagcattcaaatcaaagctaaaagcctaaatgtgaaatgctaatgacaagcctgagaaggtaaactgtgaatcttcatttctatcattgatctaactttagatattggatcaatatatttaggtggtattgaaaatgctattggaggagtcacactaatactatcaactatcagtcttcccacagcttcaatcactgtcattattctaatcctactcctacttaaattttaagttatgaggtttatgtcaaaagcaacatttcacaaatgtacttttaaggcataataagggttaacattctaggcagtataaacacaccccataatgcaagtaataggtaatctagagatgtggactttattgctatatgggaattacatttaaatttgagggcattttatataaagaaaaatacagacctataaagtttggcatattcattaagttatcttttaatatttttttctagaaaacaggtgacatttgtatctacgataaaaatttttatacagaacctactgcctcaaactgaatcccatcaagaaaactagtttctattgtattagtaactcaaaataaattatcacttcgaaaacttgctttcccacactaaggtaagttcagactagattgaacactccagaattttttactacagactgtttttaagttagaagtgatggcaattttataaatagagaatatacttccactgatgcccttactgtgccaaaacaaaaatcttaagaaaagcaagtagacaccttcataactatgaatgaagctgctgaagtagtgtttaggatcctccatggcagttagtgaatgtaagaagtacagtgttaaagtgttgtaaacagttactcagtgcaatgtatagcctgagtctatccatgatggctatatccaatttgacatcacgttatggatcagtacacaatgaaaaaccaaagaaccacagtatatcttattcttaacttttgtaaaccatgttttatgggtaactttttagttttcccaaaaggctgataaatttcaatattttgaatacatcattgttaattttgagttggcagaggtaaactaaccaactaccattatgttttagtactaagggatatacctttcaataaagttaatgaaattcaaaaaaaaaaaaaaaaaa

SEQ ID NO: 1307 - DNA, 3376 bp, Homo sapiens
tttggggctgagtttaataagcgagcgagcgagcaagcgagcgcggggggaaaaaggcagagaatgtccgccatctaccctccgctcctgggcgcgctctcattcatagcagcctcttcatgaattacagctgagggggggcggaggaggggggggtaccacacaacaccccagcaaacctccgggcccccaggcatggctagctcgtgttccgtgcaggtgaagctggagctggggcaccgcgcccaggtgaggaaaaaacccaccgtggagggcttcacccacgactggatggtgttcgtacgcggtccggagcacagtaacatacagcactttgtggagaaagtcgtcttccacttgcacgaaagctttcctaggccaaaaagagtgtgcaaagatccaccttacaaagtagaagaatctgggtatgctggtttcattttgccaattgaagtttattttaaaaacaaggaagaacctaggaaagtccgctttgattatgacttattcctgcatcttgaaggccatccaccagtgaatcacctccgctgtgaaaagctaactttcaacaaccccacagaggactttaggagaaagttgctgaaggcaggaggggaccctaataggagtattcataccagcagcagcagcagcagcagcagtagcagcagcagcagcagcagcagcagcagcagtagcagcagcagcagcagcagcagcagcagcagtagcagcagcagtagcagcagcagcagcagcagtagtaccagtttttcaaagcctcacaaattaatgaaggagcacaaggaaaaaccttctaaagactccagagaacataaaagtgccttcaaagaaccttccagggatcacaacaaatcttccaaagaatcctctaagaaacccaaagaaaataaaccactgaaagaagagaaaatagttcctaagatggccttcaaggaacctaaacccatgtcaaaagagccaaaaccagatagtaacttactcaccatcaccagtggacaagataagaaggctcctagtaaaaggccgcccatttcagattctgaagaactctcagccaaaaaaaggaaaaagagtagctcagaggctttatttaaaagtttttctagcgcaccaccactgatactcacttgttctgctgacaaaaaacagataaaagataaatctcatgtcaagatgggaaaggtcaaaattgaaagtgagacatcagagaagaagaaatcaacgttaccgccatttgatgatattgtggatcccaatgattcagatgtggaggagaatatatcctctaaatctgattctgaacaacccagtcctgccagctccagctccagctccagctccagcttcacaccatcccagaccaggcaacaaggtcctttgaggtctataatgaaagatctgcattctgatgacaatgaggaggaatcagatgaagtggaggataacgacaatgactctgaaatggagaggcctgtaaatagaggaggcagccgaagtcgcagagttagcttaagtgatggcagcgatagtgaaagcagttctgcttcttcacccctacatcacgaacctccaccacccttactaaaaaccaacaacaaccagattcttgaagtgaaaagtccaataaagcaaagcaaatcagataagcaaataaagaatggtgaatgtgacaaggcatacctagatgaactggtagagcttcacagaaggttaatgacattgagagaaagacacattctgcagcagatcgtgaaccttatagaagaaactggacactttcatatcacaaacacaacatttgattttgatctttgctcgctggacaaaaccacagtccgtaaactacagagttacctggaaacatctggaacatcctgaggatataacaactggatgcatcaagaactattgtgttttttttttttggttttttttttttttggttgtgattttttgttcttgttgtttatatgaaaacactcaaaatgatgcaaccaaaagggaaaaaataaaaatcaaacaaccttcagctttatttttctttaaagccagtcatcatctcttgataaaggagaggttaaagcaaaccagcctcagcggaccactcttctctccaaggaaatccccgggaagagttagcctggatagccttgaaaacaaacaaatcaaacacaacacaagaaaactcaaagaatgtgtatggtatcatgtatctctctgtggtggttcattccacaggacgaatgcatattcaacacactgccttattacataactgatctatttattatcgcatacagatattctaagtcgttgagggaatgacaccatcagacattataagtacttggtcccgtggatgctctttcaatgcagcacccttgccatcccaagcccagtgaccttactcgtataccgtgccactttccaccaactttttccaagtcctttaactcgttgcagtctgtattttccaccttttgtttttccagttccaggacacagattatcaactggggggaccaaatagccaccttgattttcttctttgtggtctttttcctgaaagttggggcccagtccttggctgtatccatgtaatgatcttggaccatggtagaaaatgcaccaaataggatcatatgaattgctgtctagccttagtcaataaacttgtaggacttttaaacaaaagtgtacctgtaaatgtcctgaatccagcattgttgagctgtcatcaacattcttgtgtctgttttactgttacaatattaggtgaatatggaagtaaaggcattccacaggatcatcatttaaaaaaaaagaattctggtcctgttttctaaaaaaaaaaaactgttgtagaaattcttaatttggatctatttattagtcagagtttcagctttcttcagctgccagtgtgttactcatctttatcctaaaaatctggaatcagagatttttgtttgttcacatatgattctcttagacacttttatatttgaaaaaattaaaatctttctttggggaaaaattcttggttattctgccataacagattatgtattaacttgtagattcagtggttcaatacctgtttagttgcttgctaatatttccagaaggatttcttgtattggtgaaagacggttggggatggggggatttttttgttcttgttgtacccttgttttgaaactagaaatctgtcctgtggcatgcaaaagaaagcaaattatttttaaaagaaaaaaaccaaagtacttttggtgtcattattccatcttctccataagtggagaaatgaaaagtaagaacagctcatcttcaaagtttttactagaaattc

SEQ ID NO: 1308 - DNA, 6762 bp, Homo sapiens
ggcgcgctcgggcctccgctcttcacgcgccgcattcgtagcccgagagtccgcgccgcggggaggcttggaggcaagcgctgcccgcgagctgagccgccggaggaggagccgcgggcaacgaggtttctctgtcattcacagaaaaatgaatcatttaaacctttggaggactcagttatcacaatacttctctactaccaactaagatttatgatagtaaatttatgagagcaaatttccatgttatagaactgttgaagaactaaaagaggatattctttcatcaaaataattctgcagtatcataatattactaaataaaattaaaaagcacaattattaaattattaaatttgccacacatgtgcagcagctactgtatcctgatagtgaccaaacctcaaatataaatggtttcccttcatgggaaaagccattatatttggaagaaaccactgaacattgttattaaatatattttcagctaactgtcatttaggagaattttcatgaaacaagttctagaaagttccaagtcccaccagtaagtggatttgatattatggcagcaacttacagacttgtggttagtactgtgaaccactacagcagcgtggtgatagaccggcgttttgaacaagctatacattattgcactggaacctgccacaccttcacacatggaattgactgcattgtggtacaccatagtgtttgtgcagacctcttgcacatccctgtgtctcagttcaaagatgcagatctgaactctatgtttctaccccatgaaaatgggctttcttcggctgaaggagactatccccaacaggccttcacaggcatacccagggtcaagagaggatctacatttcagaatacctacaacttaaaggatattgcaggagaagcaatcagttttgccagtgggaaaataaaagaattttcctttgaaaaactcaaaaactctaaccatgcagcttacagaaagggaaggaaagttaagtctgactcatttaataggaggtcagttgatttggacttgctttgtggccattataacaacgatgggaacgccccatcctttggtttactgcggagttcctcagttgaggaaaaacctttgtctcatagaaactcactggatacgaacctgacttccatgtttcttcaaaacttttctgaagaagacttggttactcagattttggaaaaacataaaatagataatttttcttctgggacagacataaagatgtgcttggacatcttattgaaatgctccgaggatttaaaaaaatgcacagacatcataaaacaatgcataaagaaaaaatcagggagtagcatcagtgaaggaagtggtaatgatacaatttctagctctgaaactgtctatatgaatgtaatgaccaggttagcatcctatctgaaaaagttaccatttgaattcatgcagtctgggaataatgaggctctagatttaacagaactgatcagtaatatgcctagcttacaactgactcccttctccccagtgtttggcactgaacaaccccctaaatatgaagatgttgtccagctctcagcttctgactctggacgatttcaaactattgaattgcaaaatgacaagcctaattctaggaagatggacactgtacaatccattccaaacaactccacaaattccttatataacttagaggtaaatgatcctagaactctaaaagctgtccaggtccaatcacagtcattaaccatgaatcctttagaaaatgtttcttctgacgacttaatggaaactctttatattgaagaagagtcagatggaaagaaagcattagataaaggacaaaagacagagaatggacctagtcatgagttattaaaggtaaatgaacatagagcagaatttccagaacatgctactcatcttaaaaaatgccccaccccaatgcaaaatgaaattggtaagatatttgagaaatcatttgttaatctacctaaggaagactgtaaatcaaaagtttctaaatttgaagagggagaccagagagattttacaaattccagtagccaggaagagatagataaattgttaatggatttggaatctttttcacagaagatggagacctctctaagagagccacttgcgaagggtaaaaactctaattttttaaatagtcacagtcagttgaccggtcagacccttgtagatcttgagcctaaatctaaagtctcttcacccatagaaaaagtctcaccttcctgtctaacaaggattattgaaaccaatggacacaaaatagaggaagaggatcgagccctcttactgcgaatcctggaaagcattgaagactttgctcaagaactagttgaatgcaaatcaagcagagggagcctatcacaagaaaaggaaatgatgcaaattctacaggaaaccttgacaacttcctcccaggccaatttatcagtctgtagaagtcctgttggtgataaagccaaagatactacttcagcagttttgattcagcagactccagaggtgatcaagattcaaaataaaccagaaaagaaacctggaacaccactcccacctccagccacctctccaagtagtccccgacctctctccccggttccccatgtgaataatgttgtgaatgcgccattgtccataaacattccacggttctactttcctgaaggactcccagatacctgtagtaatcatgaacaaactctaagcagaattgaaactgctttcatggatattgaagaacagaaagcagacatttatgaaatggggaaaattgcaaaggtctgtggctgtcctctctattggaaagcccccatgttcagggctgcagggggagagaagacaggatttgtgacagcacagtcattcattgccatgtggagaaagttgctgaataaccatcatgatgatgcctctaaattcatctgtcttctagcaaagcccaactgcagctctctagaacaggaggatttcatccctctacttcaggatgtggtggatacccaccctggtctcacgttcctgaaagatgctccagaattccactcccgctacatcaccacggttattcagagaatattctacacagtcaacagatcttggagtggaaaaattacttcgacagagataagaaaaagcaactttttgcaaaccctagcacttttggaagaagaggaagatataaaccaaattacagattacttctcctatgaacatttctatgttatttattgtaaattctgggaactagatactgatcacgacctctacatcagccaggccgatctgtctcgatacaatgaccaggcttcatcaagcaggattattgaaaggatattctctggtgcagtaacaaggggaaaaacaatacagaaagagggaagaatgagctatgcagattttgtttggtttttgatctctgaagaagacaaaaggaatcctaccagcattgagtattggttccgctgcatggatgtggatggagacggtgtactctccatgtatgagctggagtacttctatgaggagcagtgtgaacggatggaagccatgggaattgagcccttgccattccatgatttactgtgccagatgcttgacctagtgaagccagctgttgatggcaaaataactctaagagatctgaagaggtgcagaatggctcacatcttctatgacactttctttaatctggagaaatacttagaccatgaacagagagatccctttgcggtccagaaggatgttgagaacgatgggcctgagccctcagactgggaccggtttgccgctgaggagtatgagacgcttgttgcagaggaatctgcccaagcacaattccaggaaggctttgaagattatgaaacagatgaacctgcctctccctctgaatttggaaacaaaagcaataaaatattaagtgcaagccttccagagaaatgtggaaagcttcaatcagtggatgaagaatagctgccggtgtctacaatgaaacgaagatgtgtattttaaatgtttctttcttgtgaagagatgttctcgtttgcatactgctttttaaagactttgatttctccaagtgtgtatcatctgcactaggaactttgtttttaagcaataggtctggatacacatttaacttaggaggctcctccaatttgcctcaaacctcttacggagcttctcctcagaagtggtaccatcgccttccaaagtcagcactctacactcttgaatgtaccaaggatctcttggcgacagtaccaagcacggttctctacacaggtgactgaagttgcctctgtgttggctggcatccctgagtcccctccgggctcctatggagcctagaagaaaccttcacttgcagaaaacttgagtcagaaaattctggaacttgaaaaagtagtaagggcctccagaattgacttagccctagtaataaaagcactgccaaaacatctcagagacttcttttatgtatactggagttcaaagatctttaacttacctggcttaatgtaatttcacagttacctgccaaactactagtcactttacatcctcaggtattgtaaccactgggccttccaactttgctggcaagctctggtaacctccctgactgtggatcttatataaaatctcaagataaaaaaacacttcttaaatgaagtatagaatttgactcatacttggaaaaagcccttttaacttttatcttttattcattgaactattgaatgatgtatttaatatccaaattagttgataactgttttcacttcctatcagaaggcctgcttgaagacataaaggaataatgatacattaaaattcttactagatagatatattccttcctcccaggagtattagactagctaatagtaaaggcctcaacgttattctttacttcatgttgaaaacaattactacagatatttcatccacctcagtatttatcaaggaaatggaaaatgatacagctataaaagaaagctgttatttactgtagttgtagatgtattcactacagaatcctacatttttcagcaggccacagtccagccaaatcctataatatccttgaaaagaaactattaaaaaggatagacatttctgatgtaagtaaaacccccaagcaacttaatatccatctgtcagtcatcaacttttcccctagattttttttttaactagttctgaaagtgtcaagaatagcttccctttccaccctacctaggttccctccttgctggcataaaggccaagcagtgaaatgaaccttgggttagagttatggtaggcaaaaagaaaaggagaatttaggaaataaatatgctataaacaaggtacagtacagtgagagttaacaatcctaggaatcctgcctgtcacaagctcccagttccctgtcattttatcttcatgattagaactgatcttccatttaactattacagaaagcagtaactattgcaactatctaatagttcacacaaaagaattaaaagcttaaaaataatttttaggaaacacaatattcaaaatctaaacacactgataaattattaagattaagattatttatgtgataaatgaaatctcctaccaatccatccagcctttaccagggaagaaaagcaattatttcatttcagatagaaatacaaaaaaaaaaaaaatacttttcttagaagccagatatggtttaaatgttttattatccataatgatctaaactaataagattcaccaaaaagtaaaaattcaattttacaatatacatttttttttttaactatttggctttacctttttaccttggttctccttactgaagtcctcttgctttcactttgatctggtttttgaagtctcttaattattggctgggcatggtgactcatgcctgtaatcccggcactttgggaggccaagggaggtgatcacttgagcccaggagtaaagaccagcctgggcaacatagtgagactccgtctctacaaaaaataaatttagctgggcatggtggtgcacatctgtagtcctaccaacttgggaggctgaggcaggagaatcgcttgagccccaggcttcgaggctgcagtgagctatgattacgacactgcactccagcctaggcgacagagcaagaccccattctcttacaaagtctctattataaaagtacatccatcaataccattccatttaaaatgggctattgtaatttacccacattatcacattttcaggaattataagaatgtgttttattgtactccttccttggagctgaatgcaaggaatgtgaattctgaggaattaaggtagaatatatttgactttctggtaaagatcatggttaagtataatcattactgccaaactggaattttcaagttattataatatcccaggccccttgataaaagctgagggttatcatgaccttaatgctaattcaatgagaaatgagtttaatagcataacattaccaaggtaatcaaactaataaaattccatatatcttccctgcatcttgtcactgtgtaccattcaaagtgtttataaaactctagattcatcaaatgagatttgctcagctttttgaaatgttaagatgtgtttggagaaggctgcatgactttgtttttcccttttagcaaaactaaataaagttgtcaaatattgaaaaaaaaaaaaaaaaa

SEQ ID NO: 1309 - DNA, 3359 bp, Homo sapiens
ggcggcggctccggggaccggggccttttgtttggagcggctgcgggggggccccggagcggcgaggccggcggccttccccagcttgctcggtcccggccacccctcgcgggggtggggggccgccccctgggccgggcatctcctcaggcgccgccgccccgccctaggccggccccgcccggcctgaggggaggaaccggccgggcctcgccgcgcggcccagccacctccggagtcgccgcctctgctctcagtgccccggatcggaggccgtccatcgcccctcgggccgacgccatgaagatcaaagatgccaagaaaccctctttcccatggtttggcatggacattgggggaactctagtaaagctctcgtactttgaacctattgatatcacagcagaggaagagcaagaagaagttgagagtttaaaaagtattcggaaatatttgacttctaacgtggcatatggatccaccggcattcgggatgtacaccttgaactgaaagatttaacactttttggccgaagagggaacttgcactttatcaggtttccaacccaggacctgcctacttttatccaaatgggaagagataaaaacttctcaacattgcagacggtgctatgtgctacaggaggtggtgcttacaagtttgaaaaagattttcgcacaattggaaacctccacctgcacaaactggatgaacttgactgccttgtaaagggcttgctgtatatagactctgtcagtttcaatggacaagccgagtgctattattttgctaatgcctcagaacctgagcgatgccaaaagatgccttttaacctggatgatccctatccactgcttgtagtgaacattggctcaggagtcagtattttagcagtccattccaaagacaactataaacgagtgactgggacaagccttggagggggtacctttctgggtttatgcagtttattgactggctgtgaaagttttgaagaggctcttgaaatggcatccaaaggtgatagcacacaagctgacaagctggtccgtgatatttatggaggagattatgaaagatttggtttgccaggttgggctgtagcatctagttttgggaatatgatttataaggagaagcgagaatctgttagtaaagaagatctggcaagagctactttagttactatcaccaataacattggttctgtggcacgaatgtgtgctgttaatgagaaaataaacagagttgtctttgttggaaactttttacgtgtcaataccctctcaatgaaacttttggcatatgcactggattactggtcaaaaggtcaactaaaagcattgtttctagaacatgagggttactttggagcagttggtgcacttcttgggctgccaaatttcagctaaagcatcaggtctctctctctgctaataaatgtcatccaagaggaactaaaaccagaggcattattactgcattgtttgtcactgggaaccaaaggataaaagagtagcataagctgctgaatgttgccatattaaaggagagaacttggtaacgtgaagtatttctcattgaaatgctttcccttttgtatatagccagtgttaaatccttaaatgcaatacagcctctgattattgagcttcctcttaaaaagatttttttattttatgtagccaacattgcagtactgtatgctcaaacacaaatcttaaagtatcggaactgtttagcttatgaaaataatcgactctgaatatttgttacaagtctgttttatgtgttttgattactagtgagcagaaaataacataccctgtattcaaaattactgaaatggcaatcaaagatgatcatttttatgtgattttagaaatgttaaggcaatactactaattattgtaggtttttttaacgtatcacccaaagcatgtatgtgatctttccccattagtatctttttctcaaatgccataattaactgaaatactattattaaattttcatgagaattctaaaatgaatcctgggaaatgcacgtttggtgatgttgcactttctgtattttacaggaattagtcaatacatgttgaaatgtttaacattttaagattggaggcttaattactgggagtctgtctaatgaagtcctgggactattgtaatggaatatgatttgagttcactgtgctctttttgtttgtttgttttggtcatatatacattcagaacttttattttaaaacaaccacaataacattaataatagaaaattcatctgtaaatattcacagtctagtcactgaaaaatgggaaaacctctaccatgccttattattaccctttgctgtttgaggagccagaaatagaggtgcagttagaggacggtcactttttccaacaaaacccactccatagccatgtggatttttatccaaaggctcaacaaccagagggaatggtgagacctgataactaaaatactgttattggcaagggtttgaaatgtgtaagaacctaggagggaaaggaagattgagcaacataggaaaaggggaagagaggctgagtgtcaccaaggtccaaactccatttataaaaatactgcaaaaccaggagttgatggtagaaatgcatatgatccatggcaggagtaaatctctccacctcctctaactctctgaaaactctagagttggagcaagtcttccatttgcttcttatccccttaaaagaatgccttccacttcccaacagcccccatcaagggaccccaagaggccaccatgctcttatctcgcactttctttcctattccccttgcctgaatctggagtggggttgagccctctgccttcaaccttaagatttaggaagttctttccccaactgtctaacttggaaaggtagatgagtctgaattttgaagtaacgaatgcaaattccactcagcagaggcaatgttatttatgtacatagggatagtggaatgagttttaatagattctgtccaaaaggggtttgttcctcttatttcctctatgtaggaagttgtgtcttaggcaactttatcagtatcaatggaaaaatgataggcactacaatgaaatggcaggatgccaatatgagatatttcaggaataataagaaatacagtttgtttgtataaaataaactatctcaagaaagttttcaacgacagtgatagtgttcatttgtaagagagagttctagaacttcgatgtccagtgcagtagccactacccatatgtagctgttgagcatttgaaatatggttagtccaaattgagatgtgctctaaaggacaataaaaggttaaatatctcct

SEQ ID NO: 1310 - DNA, 13748 bp, Homo sapiens
agcagaggagtgagtcctggccgcgtccccgtcgctagggaaaccgatgcagctggaggccgcgcgcgatgcggctcgcggaggagcgggccgcgctcgcggcggagaacgcggatggggaacccggcgccgaccgacgactgcgactcctggggacctacgtggccatgagcctgcggccggctgcgggcgcctgggagcgttgcgcggggagtgctgaggcggagcagctgctccaggccttcctgggccgcgatgctgccgaggggccgcggccgctgctggtggtgcggcccgggcccaggggcctggcaatacgccccgggctggaggtgggacctgagtcgggcctggctggcgctaaggcgctttttttccttcgcaccgggcccgagcctccagggcccgacagcttccgcggcgcagtggtctgcggggacctgcccgcggcacctctggagcacctagccgcgctgttctcggaggttgttctacccgtcctggccaatgagaagaatcgcctaaactggccccacatgatatgtgaggatgtcaggcggcacgcccacagcctccaatgtgacctctcagttatacttgagcaagtgaagggaaaaactttgctgcctcttccagcaggctcagaaaaaatggagtttgcggattccaaaagtgagacagtcttggattctatagataagtcagtcatctatgccattgagtctgcagtgatcaaatggagctaccaagtccaggtggtactcaagagagagtcttcccagccactcttacaaggggagaatcccacccctaaggtggagttggagttctggaagagcaggtatgaagatctgaaatacatctataatcaactgagaacaataacggtgaggggcatggccaagctcctggacaagcttcagagtagctactttccagctttcaaagccatgtacagagatgttgttgcagctctagcagaggcacaggacatccatgtgcacctgataccgctccagcgccacctggaagctctggagaatgcagaatttccggaggtgaagccccagctgcggcccctgctccacgtggtctgtctgatttgggccacatgcaagtcctaccgctccccgggaaggctgactgtgctgctccaggagatttgcaaccttctcatccagcaggcctctaattatctcagcccagaagacctgctgagaagtgaggtagaagaaagtcagagaaaactgcaagtggtctcagacactttgagcttcttcaagcaagagtttcaggacagaagggagaatctccacacttacttcaaagagaaccaggaagtcaaggaatgggatttccagtcttctttggtctttgtgcgattggatggcttcctgggacgactgcacgtggtggagggtcttctgaagacggccctggatttccacaaactgggaaaggtggagttcagcggcgtcagagggaatgctctgagtcagcaggtccagcaaatgcatgaagaatttcaagagatgtacaggcttctctcaggatcctcctccgactgcctgtacctccaaagcacggactttgaaaatgacgtctctgaatttaaccagaaagtagaagatcttgaccgaagattggggactatctttattcaagcttttgatgatgcacctggcttggagcatgcctttaagctgctagacatagcaggaaacctccttgaaagaccgctggtagcgagggatacatctgataaatacctggtcctcatccaaatgttcaacaaagatctggatgcagtgaggatgatctacagtcagcacgtccaggaggaagcagaacttgggttctccccggtgcacaagaacatgcccaccgtggctggcggcctccgctgggcacaggagctgaggcagcgcatccagggtcctttcagcaactttggacgcatcacacacccttgcatggaatctgcagaaggaaagcgaatgcaacaaaaatatgaagatatgctgtcattgctagaaaagtatgagacaagactttatgaggattggtgccggacagtatcagagaagtcacagtacaatctttcccaaccacttctaaaacgtgacccagagacgaaggagatcactatcaactttaacccacagctgatttcagtgctgaaagaaatgagctatcttgaacccagagagatgaaacacatgcctgagacagcagcagccatgttctcctccagggatttctatcggcagcttgtggctaatttagagttgatggcaaattggtacaacaaggttatgaaaactctgctggaggtggaatttccattagtggaggaagagctgcaaaatattgatctccgcctcagagcagcagaggagactttgaactggaaaacagaaggcatttgcgattatgtcactgaaatcaccagtagtattcatgatcttgaacaaagaattcagaaaactaaagacaatgtggaagagatccaaaacatcatgaaaacatgggtgactccaatatttaagacaaaagatggaaaaagggaatcccttctttctctggatgatcggcatgatcgaatggaaaaatattacaatctcatcaaggaatctggccttaagatccacgcccttgttcaggaaaacctgggtctattttcagcagacccaacctccaatatctggaagacttatgttaactctattgacaatttgttgctgaatggattctttcttgccattgagtgctccctcaagtatcttctggaaaatactgagtgtaaggcaggacttaccccaatatttgaagcacaactgagtctagccatcccagagctagttttctatccgtctctggagtctggagtgaaggggggtttctgtgacattgttgagggtctcatcaccagcatttttaggataccatctctggtgccacggctttccccacaaaatggctctcctcactatcaggtcgacctggacggtataccagatttggcaaacatgcggcgcacactcatggagagagtccagagaatgatgggcctctgctgtggctatcagagcaccttcagccagtattcgtacctctatgtggaggaccggaaggaggttctgggtcagtttctgctgtacgggcacatcctcactccggaagaaattgaagaccatgtggaagatggcatcccagagaaccctcccctcctttctcagtttaaagtgcaaatcgactcctatgaaacgctctatgaagaggtgtgcaggctggaacccatcaaggtgtttgacggctggatgaaaattgatattcgaccctttaaggcatctctgctgaatattattaagaggtggagcctcctgttcaaacagcatcttgtggaccacgtcactcacagcttggccaacctggacgcgtttataaagaagagtgagagcggcttactcaagaaagttgaaaaaggagatttccaaggcttggttgagatcatgggacaccttatggctgttaaagaacggcagagtaacactgatgagatgtttgagcccttaaagcagactattgaattgctgaagacctatgaacaagaattgccagaaacagtgtttaagcagctggaggagctgcctgagaaatggaacaacataaaaaaggtggccattactgtgaagcagcaggtggccccactgcaggcaaatgaagtgacactcctccgccagaggtgcacagccttcgatgcagaacagcagcaattctgggagcaattccacaaagaagccccgttcaggtttgatagcatccaccctcatcaaatgctggatgccaggcacatcgagatccagcagatggaatccactatggcctccatttctgagtctgccagcttatttgaagtcaatgtccctgactataagcagctgaggcagtgcaggaaggaggtctgccagctgaaggagctctgggacaccattggaatggtgacctccagcatccatgcctgggagaccacaccctggaggaatatcaacgtggaagccatggagttggagtgcaaacagtttgcccggcatatccgaaacctggacaaggaggtcagggcctgggatgcattcacaggcctggaaagcactgtgtggaacacgctgagctccctgagggcagtagctgagctgcagaatccagccatccgggagcggcactggaggcagctgatgcaggccaccggtgtgagcttcactatggaccaggacaccaccctagcgcacctgctgcagctccagctgcaccactatgaggatgaggtccggggcattgtggacaaagctgcaaaagagatgggtatggagaaaaccttaaaggagctgcagactacctgggctggcatggaattccagtatgagccccacccacggaccaatgtccccctcctgtgctctgatgaggacctcatagaggttctggaggataatcaagttcaacttcagaacctggtgatgtccaagtatgttgctttcttcttggaggaggtgtcgggctggcagaagaagctgtccacagtggacgctgtcatctctatctggtttgaagtgcagcgaacatggactcacctggaaagcatattcactggatctgaagatattcgggcacagctaccccaggattctaaaaggtttgaaggcatcgacattgactttaaagagctagcttatgatgcccagaaaattccaaatgtagtgcaaaccaccaacaagccaggcctgtatgaaaagctggaggatattcagggcagattgtgcctgtgtgagaaggccctggcagagtacctcgacaccaagaggcttgccttcccgcggttttactttctctcctcctccgatctgttagacatcctttccaacggcacagctccacaacaggttcaacgtcacctttccaaactctttgacaacatggccaagatgcgattccagctagatgccagtggggaaccaaccaagacaagcctcggcatgtacagcaaagaagaggagtatgtggctttcagtgagccctgtgactgcagcgggcaggtagaaatatggctgaaccatgtccttggtcacatgaaggccactgtgaggcatgagatgacagaaggtgtaactgcctatgaagaaaagccgagggagcagtggctttttgaccacccagctcaggtggccctgacctgtactcagatctggtggacaacagaagtgggcatggcatttgccaggctggaggaaggctatgagagtgccatgaaggactattataagaagcaagtggcccagctcaaaacccttatcaccatgctgattggccagctctccaagggagaccggcagaagattatgactatatgcaccatcgatgtgcatgcccgggatgtggtagccaagatgattgctcagaaggtagacaatgcccaggctttcctctggctgtctcagctgcgccatcgttgggatgacgaggtcaaacactgctttgccaacatctgtgatgcccagtttttgtattcctatgagtacctgggaaacacacctcgcttggtgatcacacctttgactgacaggtgctacatcaccctcacccagtccctgcacctgaccatgagtggggctcccgcaggacctgcaggcacaggcaagaccgagaccaccaaggacctgggccgcgcactgggcatcctggtctatgtgttcaactgctcggagcagatggattacaagtcttgtggcaacatctacaaaggccttgctcagactggtgcctggggctgctttgatgagtttaatcgaatctccgtggaggtcttgtcagtggtggcagtgcaggtaaaaagcattcaagatgcgattagagataagaagcagtggttcagcttccttggggaggagatcagcctgaatccttctgtcggtatcttcatcaccatgaacccaggctatgctggccgcacagagctgccagagaatctcaagtctctcttcaggccttgtgcaatggtggttccagactttgaattgatctgtgaaatcatgctggtggcagaaggattcattgaagcccagtcattagccagaaagttcatcactctttaccagttgtgcaaagagcttctctccaaacaggatcactacgactggggcctacgggccatcaagtccgtgctggtggtggcaggatccctgaagagaggagaccctgaccggcctgaggaccaggtcctgatgcgctccttgcgggatttcaacatccccaagattgtgactgatgacatgcccatcttcatgggcctgatcggggacctctttcccgccctggatgtcccccggaggagagaccccaacttcgaagctttggttaggaaggcgatagtggatctgaagctccaggctgaggacaactttgtgctcaaggtggtccagctggaggagctcctggctgtgcggcactctgtatttgtggtgggtggcgctggtaccggcaagtcacaggtgctgaggtccttgcacaagacctatcagatcatgaaacggcgccccgtctggactgacctcaatcccaaagcagtcacaaatgatgagctctttggcatcatcaatccagccacaggagaatggaaggatggattgttctcttccatcatgcgggagcttgccaacatcacccatgatgggcccaagtggattttactggatggcgacatagatccaatgtggattgaatccctgaatactgtcatggatgataacaaggtgctgacattggccagcaatgagaggattcctctgaaccccaccatgaagctcctctttgagatcagccacctgcgcacagccactccagcaactgtctctagagcagggatcttgtacatcaacccggcagacttgggatggaaccctccagtgagcagctggattgagaagagggaaatccagacagagagagccaacttaaccattttgttcgacaagtatcttccaacctgcctagacacactcagaaccaggtttaagaagatcattcccatcccagagcagagcatggttcagatggtgtgtcaccttctggaatgtctcctgaccacggaggacatccctgcagactgccctaaggaaatttatgagcattattttgtgtttgctgccatctgggctttcggcggagcaatggtccaagatcagcttgtggactaccgggcagagttcagcaaatggtggctgactgagttcaaaacagtcaagtttccttcccaaggaaccatctttgactattacatcgacccagagaccaagaaattcgagccttggtccaagctcgtcccccagttcgaatttgaccccgagatgcccttgcaggcgtgtttggtgcacacgagtgagaccatccgtgtgtgctacttcatggagcggttgatggcgcggcagcggcctgtcatgctggtgggcacggctggcactggcaagtcggtgctggtgggagctaagctggccagccttgaccccgaggcatacctggtgaaaaacgtgccattcaactactacaccacgtcagcaatgctgcaggctgtcctggagaagcctctggaaaagaaggctggcagaaactatggccctccagggaacaagaaactcatctatttcattgatgacatgaacatgcctgaggtggatgcctacgggacggtgcagccccacaccatcatccggcagcatctggactatggccactggtatgatcggagcaagctgtccctaaaggagatcacaaatgtacagtatgtttcctgtatgaaccccacggcaggcagcttcaccatcaacccccggcttcagcgtcacttcagcgtgtttgtcctctccttcccgggggcagatgccctgtcctctatctacagcatcatcctcactcagcatctgaagctcggaaacttcccggcgtccctgcagaaatccatccccccactgatcgatctggccctcgccttccaccagaaaattgctaccaccttcctacccacaggaatcaaattccactacatcttcaacctcagagattttgccaacattttccagggcattctcttctcctcagtggaatgtgtgaaatccacatgggatcttataaggctctatctgcatgaatcaaatcgagtttatcgggataagatggtagaagaaaaggactttgatctttttgataaaatccagacagaagtgctcaagaaaacttttgatgatattgaagaccctgtggagcagacccaaagcccgaacctgtattgtcactttgcaaatggtattggggagcccaaatacatgcctgtacagtcttgggaacttttgacccagactctggtggaggccttggagaaccacaatgaagtcaacacagtgatggacctagttctctttgaggatgccatgcgccatgtctgccatatcaatcgcatcttggagtccccgcggggaaatgctctgctggttggtgtaggtgggagcggcaagcagagcctgacaaggctggcagctttcatcagctccatggatgtcttccagatcacactgcgcaaaggctaccagatccaggacttcaagatggacctggccagcctgtgtctgaaagctggagtgaagaatctcaacacagtgtttctcatgactgatgcccaagtggctgatgagaggttccttgtgctcatcaatgatcttttggcatctggggagatcccagatctctactctgatgatgaagttgaaaacatcataagcaatgtgaggaatgaagtcaagagccagggtctggttgacaacagagagaactgttggaagttctttatagatcggatccggcgacagctgaaggtgactctctgtttctcccctgtgggaaacaagctaagagtccgcagcaggaagttcccagccattgtgaactgcacagccatccactggttccacgagtggcctcagcaagcattggagtctgtcagcctccgcttcttgcagaacacagagggcattgagcccacagtaaagcagtcgattagcaaattcatggcctttgtccacacaagtgtcaaccaaacatcccagtcttatctgagcaatgaacagcgctacaactatacaactcccaagtcctttctggagttcatcagactctaccagagcttgttgcacaggcacagaaaagagctcaagtgcaagacagagcggttggagaacgggctgctgaagctgcatagcacctctgcccaggtggatgatctgaaagcaaagctggctgcccaggaagtagagctgaagcagaaaaatgaagatgcagacaaactgattcaggtcgtgggtgtggagactgacaaagtgagcagagagaaagccatggcagatgaagaggagcagaaggtggccgtcatcatgctagaggtgaaacagaagcagaaggactgtgaggaggacctggcaaaggctgagccagcactcacagcagcgcaggcagctctcaacaccctgaacaagaccaacctgacagagctgaagtcatttggctctccgcctctggccgtcagcaatgtcagcgctgcggtgatggtactgatggctcccaggggtagggtgcccaaggaccggagctggaaggctgctaaggtcaccatggccaaagtggatggcttcctggactcgctaataaacttcaacaaagagaacattcacgagaactgcctcaaagccatcaggccgtatctgcaagacccggagttcaatcctgagtttgtggccaccaaatcctatgcggctgcaggcctctgctcctgggtcatcaatattgtgagattttatgaggtgttctgtgatgtggaacccaagcgccaggcactgaacaaagccaccgcggacctcacagctgcccaggagaagctggctgccatcaaagccaagatcgctcaccttaatgaaaacctggcaaagctcacagccaggtttgagaaagcaacagcagacaaactcaaatgtcagcaagaagccgaagtgaccgcagtcaccatctcccttgccaaccgcctggttggaggactcgcttctgaaaacgtgaggtgggcagatgccgtgcagaacttcaaacagcaggaaaggacgttatgtggagacattttacttataacggctttcatttcctaccttggcttcttcacaaagaaataccggcagagcctcctggacagaacttggaggccctacctgagccagctgaaaactcccattccagtcaccccagccctggatcccctgaggatgctgatggatgatgctgacgtggctgcctggcagaacgagggcctcccagccgaccgcatgtccgtggagaatgccaccattctcatcaactgtgagcgctggccactcatggttgaccctcagctacaaggcatcaaatggatcaagaataaatatggtgaagatctccgggtcacgcagattggtcagaaaggctaccttcaaatcatagagcaggccctggaagctggagctgtggtgctgattgaaaatctagaggagtccattgatcctgttctgggacccctgcttgggagagaagtcattaaaaaaggacgattcattaaaattggagacaaagaatgtgaatacaatcccaagttccggctcatcctccacaccaagctggctaatcctcactaccagcctgagctgcaggctcaggccaccctgatcaacttcaccgtgaccagggatggcctggaggaccagttgctggccgctgtggtcagcatggagaggccagacttggagcagctgaagtccgatctcacaaagcagcagaatggattcaaaattaccctgaaaacgctggaagacagtcttctctctcgcctctcctccgcctctgggaacttcctgggagaaacagtgctggtggaaaacctagagatcaccaagcagactgctgccgaagttgagaaaaaggtccaggaggccaaggtgactgaagtgaaaatcaacgaggcccgagagcactaccggccagcagctgccagggcctcactgctctacttcatcatgaacgacctcagcaagatccatccaatgtaccagttttctctcaaggccttcagtatcgtcttccagaaggctgtggagagggctgctcctgacgaaagcctcagggagcgggtggccaacctaatagacagcataaccttctctgtgtaccagtacaccatccgcgggctctttgagtgtgataagctgacctaccttgcccagctcacctttcagattctcctcatgaaccgagaagtcaatgcagtggagttggatttcctgcttcgatctccagtgcagacgggcaccgccagccccgtggagttcctctcccatcaggcgtggggagctgtcaaggtactttcatcaatggaagaattctctaatctggatcgggacatagagggatctgctaagagctggaaaaagtttgtggagtccgaatgtcctgagaaagagaagctcccacaggagtggaagaacaagacagccctgcagcgcctctgcatgctgagagccatgcggcccgaccggatgacctatgctttgcgagattttgttgaagagaagttaggaagcaaatacgtggtgggaagagccctagattttgcaacctcatttgaagaatcgggaccagccactcctatgtttttcatcctgtctccaggggtggacccactgaaggatgtagaaagtcaaggaagaaaacttggatacaccttcaacaatcagaactttcacaacgtgtctttggggcaaggacaggaagtggtggctgaggctgcgctggacctcgctgccaagaaaggtcactgggttattttgcagaacattcacctggtggccaagtggctcagcaccctggagaagaagctggaggagcacagtgagaacagccacccagagttcagggtcttcatgagtgcagagccagcaccctcccctgagggccacatcatcccccagggcatcctggagaactccattaagatcaccaatgagccccccacgggcatgcatgccaacctgcacaaggccctggacaacttcactcaggacactctggagatgtgttctcgggagacggagtttaagagcatcctctttgctctttgttacttccatgcggtggtggcagaaagacgaaaatttgggccccagggatggaatcgctcatacccctttaacactggagacctcactatctctgtgaatgtcctctacaacttcctggaggccaacgcaaaggtcccctatgatgatttgcgctacctgtttggagagatcatgtatggaggccatatcacagatgactgggacagaagactctgcagaacctacctgggggaattcattcgaccagaaatgttagaaggagaactgtctttggccccagggttcccactcccaggcaacatggactacaatggttatcatcagtacatcgatgctgagctgcccccagaatccccctacctctatggcctccacccgaacgcagagattggcttcctgacccaaacctcagaaaagctcttccgcactgtgctggagctgcagcctcgggacagccaggccagagacggagcgggcgccacaagagaagaaaaggtcaaggcacttctggaagaaatattggagcgggtgacagacgagtttaacatcccagaactgatggccaaagtggaggagcgcaccccttacattgtagttgccttccaggagtgtggccggatgaatatcctcaccagagagattcagcgctcactgagggagctggagctcggcttaaagggggagctgactatgaccagccacatggagaacttacagaatgccctgtacttcgatatggtgccagagtcctgggctagacgagcctacccttccacagcaggcctggcagcctggtttccagacctcctcaacagaatcaaggagctagaggcttggacgggtgactttacaatgccctccactgtgtggctgacaggcttcttcaacccccagtcgttcctgactgccatcatgcagtccacggctcgcaagaatgagtggccactggaccagatggccctgcaatgtgacatgacgaagaagaacagagaagagtttaggagtcctcctcgggaaggggcctacatccatggcctcttcatggaaggtgcctgctgggacacacaggctgggatcattacagaggcaaagctgaaggatctgacaccccctatgcctgtgatgttcatcaaggccattcctgcagataagcaggactgccgcagtgtctattcctgtcctgtgtacaagactagtcagcggggacccacctacgtgtggactttcaacctgaagactaaggaaaacccatccaagtgggttctggctggagtagccttgcttctccagatttagcatcctgcagagccaccgagaaaataaaaaagctgggcttggaggctgcctagagggacaggtgggtgaagggtcaccacagacacttagaacggtaagaaaccatgagcactcacaattctgtagaattcctctagggaacttggagaggtgtgcctaaggtgaggctgagctgaaggaatgtgggcccaggtttcttaataaaatgatttactcttc

SEQ ID NO: 1311 - DNA, 563 bp, Homo sapiens
aatcatattagtgaagattaggaagaagctttaaaatcccaaggctagtgtgcattgctagaattgttaagagagagagctcatatgaaattggttatcgtgggatatttaaaataaaacaaagaacagtttactttcaggcaaaaagatgccagtaatcaatattgaggacctgacagaaaaggacaaattgaagatggaagttgaccagctcaagaaagaagtgacactggaaagaatgctagtttccaaatgttgtgaagaagtaagagattacgttgaagaacgatctggcgaggatccactggtaaagggcatcccagaggacaaaaatcccttcaaggagctcaaaggaggctgtgtgatttcataatacaaacaaaaagaaaaaaaattaaacaaattcttggaaatatctcaaatgttaataacaatatgaatttttctcatgcatactattactactaagcatgtacgtgaatttttaaatgtatagatgtaaacttttaataaaaattggggtgtggtaacacaaaaaaaaaaaaaaaaaaaaaaaaaaaaaa

SEQ ID NO: 1312 - DNA, 2876 bp, Homo sapiens
tgaaacctaacccgccctggggaggcgcgcagcagaggctccgattcggggcaggtgagaggctgactttctctcggtgcgtccagtggagctctgagtttcgaatcggcggcggcggattccccgcgcgcccggcgtcggggcttccaggaggatgcggagccccagcgcggcgtggctgctgggggccgccatcctgctagcagcctctctctcctgcagtggcaccatccaaggaaccaatagatcctctaaaggaagaagccttattggtaaggttgatggcacatcccacgtcactggaaaaggagttacagttgaaacagtcttttctgtggatgagttttctgcatctgtcctcactggaaaactgaccactgtcttccttccaattgtctacacaattgtgtttgtggtgggtttgccaagtaacggcatggccctgtgggtctttcttttccgaactaagaagaagcaccctgctgtgatttacatggccaatctggccttggctgacctcctctctgtcatctggttccccttgaagattgcctatcacatacatggcaacaactggatttatggggaagctctttgtaatgtgcttattggctttttctatggcaacatgtactgttccattctcttcatgacctgcctcagtgtgcagaggtattgggtcatcgtgaaccccatggggcactccaggaagaaggcaaacattgccattggcatctccctggcaatatggctgctgattctgctggtcaccatccctttgtatgtcgtgaagcagaccatcttcattcctgccctgaacatcacgacctgtcatgatgttttgcctgagcagctcttggtgggagacatgttcaattacttcctctctctggccattggggtctttctgttcccagccttcctcacagcctctgcctatgtgctgatgatcagaatgctgcgatcttctgccatggatgaaaactcagagaagaaaaggaagagggccatcaaactcattgtcactgtcctggccatgtacctgatctgcttcactcctagtaaccttctgcttgtggtgcattattttctgattaagagccagggccagagccatgtctatgccctgtacattgtagccctctgcctctctacccttaacagctgcatcgacccctttgtctattactttgtttcacatgatttcagggatcatgcaaagaacgctctcctttgccgaagtgtccgcactgtaaagcagatgcaagtatccctcacctcaaagaaacactccaggaaatccagctcttactcttcaagttcaaccactgttaagacctcctattgagttttccaggtcctcagatgggaattgcacagtaggatgtggaacctgtttaatgttatgaggacgtgtctgttatttcctaatcaaaaaggtctcaccacataccatgtggatgcagcacctctcaggattgctaggagctcccctgtttgcatgagaaaagtagtcccccaaattaacatcagtgtctgtttcagaatctctctactcagatgaccccagaaactgaaccaacagaagcagacttttcagaagatggtgaagacagaaacccagtaacttgcaaaaagtagacttggtgtgaagactcacttctcagctgaaattatatatatacacatatatatattttacatctgggatcatgatagacttgttagggcttcaaggccctcagagatgatcagtccaactgaacgaccttacaaatgaggaaaccaagataaatgagctgccagaatcaggtttccaatcaacagcagtgagttgggattggacagtagaatttcaatgtccagtgagtgaggttcttgtaccacttcatcaaaatcatggatcttggctgggtgcggtgcctcatgcctgtaatcctagcactttgggaggctgaggcaggcaatcacttgaggtcaggagttcgagaccagcctggccatcatggcgaaacctcatctctactaaaaatacaaaagttaaccaggtgtgtggtgcacgtttgtaatcccagttactcaggaggctgaggcacaagaattgagtatcactttaactcaggaggcagaggttgcagtgagccgagattgcaccactgcactccagcttgggtgataaaataaaataaaatagtcgtgaatcttgttcaaaatgcagattcctcagattcaataatgagagctcagactgggaacagggcccaggaatctgtgtggtacaaacctgcatggtgtttatgcacacagagatttgagaaccattgttctgaatgctgcttccatttgacaaagtgccgtgataatttttgaaaagagaagcaaacaatggtgtctcttttatgttcagcttataatgaaatctgtttgttgacttattaggactttgaattatttctttattaaccctctgagtttttgtatgtattattattaaagaaaaatgcaatcaggattttaaacatgtaaatacaaattttgtataacttttgatgacttcagtgaaattttcaggtagtctgagtaatagattgttttgccacttagaatagcatttgccacttagtattttaaaaaataattgttggagtatttattgtcagttttgttcacttgttatctaatacaaaattataaagccttcagagggtttggaccacatctctttggaaaatagtttgcaacatatttaagagatacttgatgccaaaatgactttatacaacgattgtatttgtgacttttaaaaataattattttattgtgtaattgatttataaataacaaaattttttttacaacttaaaaaaaaaaaaaaa

SEQ ID NO: 1313 - DNA, 1410 bp, Homo sapiens
cggaattagggagatagttggtattaggattaggattgttgtgaagtatagtacggatgctacttgtgcaatgatggtaaaagggtagcttactggttgtcctccgattcaggttagaatgaggaggtctgcggcttggagctcctggggcctaacaaaaagaaacctgccatgctgctcttcctcctctctgcactggtcctactcacacagcccctgggctacctggaagcagaaatgaagacctactcccacagaacaacgcccagtgcttgcaccctggtcatgtgtagctcagtggagagtggcctgcctggtcgcgatggacgggatgggagagagggccctcggggcgagaagggggacccaggtttgccaggagctgcagggcaagcagggatgcctggacaagctggcccagttgggcccaaaggggacaatggctctgttggagaacctggaccaaagggagacactgggccaagtggacctccaggacctcccggtgtgcctggtccagctggaagagaaggtcccctggggaagcaggggaacataggacctcagggcaagccaggcccaaaaggagaagctgggcccaaaggagaagtaggtgccccaggcatgcagggctcggcaggggcaagaggcctcgcaggccctaagggagagcgaggtgtccctggtgagcgtggagtccctggaaacgcaggggcagcagggtctgctggagccatgggtccccagggaagtccaggtgccaggggacccccgggattgaagggggacaaaggcattcctggagacaaaggagcaaagggagaaagtgggcttccagatgttgcttctctgaggcagcaggttgaggccttacagggacaagtacagcacctccaggctgctttctctcagtataagaaagttgagctcttcccaaatggccaaagtgtcggggagaagattttcaagacagcaggctttgtaaaaccatttacggaggcacagctgctgtgcacacaggctggtggacagttggcctctccacgctctgccgctgagaatgccgccttgcaacagctggtcgtagctaagaacgaggctgctttcctgagcatgactgattccaagacagagggcaagttcacctaccccacaggagagtccctggtctattccaactgggccccaggggagcccaacgatgatggcgggtcagaggactgtgtggagatcttcaccaatggcaagtggaatgacagggcttgtggagaaaagcgtcttgtggtctgcgagttctgagccaactggggtgggtggggcagtgcttggcccaggagtttggccagaagtcaaggcttagaccctcatgctgccaatatcctaataaaaaggtgaccatcaaaaaaaaaa

SEQ ID NO: 1314 - DNA, 7586 bp, Homo sapiens
gttctttgtgacacatcacacagaattggagtgctgtccttctggagagtggtggagaaccaagatacagttcagaaccaaaggaatagagaagggctttgatttctttttggctttagattggggatttgggaggcttagcaggaaagatgtccactgaaaatgtggaagggaagcccagtaaccttggggagagaggaagagcccggagctccactttcctcagggttgtccagccaatgtttaaccacagtattttcacttctgcagtctctcctgctgcagaacgcatccgattcatcttgggagaggaggatgacagcccagctccccctcagctcttcacggaactggatgagctgctggccgtggatgggcaggagatggagtggaaggaaacagccaggtggatcaagtttgaagaaaaagtggaacagggtggggaaagatggagcaagccccatgtggccacattgtcccttcatagtttatttgagctgaggacatgtatggagaaaggatccatcatgcttgatcgggaggcttcttctctcccacagttggtggagatgattgttgaccatcagattgagacaggcctattgaaacctgaacttaaggataaggtgacctatactttgctccggaagcaccggcatcaaaccaagaaatccaaccttcggtccctggctgacattgggaagacagtctccagtgcaagtaggatgtttaccaaccctgataatggtagcccagccatgacccataggaatctgacttcctccagtctgaatgacatttctgataaaccggagaaggaccagctgaagaataagttcatgaaaaaattgccacgtgatgcagaagcttccaacgtgcttgttggggaggttgactttttggatactcctttcattgcctttgttaggctacagcaggctgtcatgctgggtgccctgactgaagttcctgtgcccacaaggttcttgttcattctcttaggtcctaaggggaaagccaagtcctaccacgagattggcagagccattgccaccctgatgtctgatgaggtgttccatgacattgcttataaagcaaaagacaggcacgacctgattgctggtattgatgagttcctagatgaagtcatcgtccttccacctggggaatgggatccagcaattaggatagagcctcctaagagtcttccatcctctgacaaaagaaagaatatgtactcaggtggagagaatgttcagatgaatggggatacgccccatgatggaggtcacggaggaggaggacatggggattgtgaagaattgcagcgaactggacggttctgtggtggactaattaaagacataaagaggaaagcgccattttttgccagtgatttttatgatgctttaaatattcaagctctttcggcaattctcttcatttatctggcaactgtaactaatgctatcacttttggaggactgcttggggatgccactgacaacatgcagggcgtgttggagagtttcctgggcactgctgtctctggagccatcttttgcctttttgctggtcaaccactcactattctgagcagcaccggacctgtcctagtttttgagaggcttctatttaatttcagcaaggacaataattttgactatttggagtttcgcctttggattggcctgtggtccgccttcctatgtctcattttggtagccactgatgccagcttcttggttcaatacttcacacgtttcacggaggagggcttttcctctctgattagcttcatctttatctatgatgctttcaagaagatgatcaagcttgcagattactaccccatcaactccaacttcaaagtgggctacaacactctcttttcctgtacctgtgtgccacctgacccagctaatatctcaatatctaatgacaccacactggccccagagtatttgccaactatgtcttctactgacatgtaccataatactacctttgactgggcatttttgtcgaagaaggagtgttcaaaatacggaggaaaccttgtcgggaacaactgtaattttgttcctgatatcacactcatgtcttttatcctcttcttgggaacctacacctcttccatggctctgaaaaaattcaaaactagtccttattttccaaccacagcaagaaaactgatcagtgattttgccattatcttgtccattctcatcttttgtgtaatagatgccctagtaggcgtggacaccccaaaactaattgtgccaagtgagttcaagccaacaagtccaaaccgaggttggttcgttccaccgtttggagaaaacccctggtgggtgtgccttgctgctgctatcccggctttgttggtcactatactgattttcatggaccaacaaattacagctgtgattgtaaacaggaaagaacataaactcaagaaaggagcagggtatcacttggatctcttttgggtggccatcctcatggttatatgctccctcatggctcttccgtggtatgtagctgctacggtcatctccattgctcacatcgacagtttgaagatggagacagagacttctgcacctggagaacaaccaaagtttctaggagtgagggaacaaagagtcactggaacccttgtgtttattctgactggtctgtcagtctttatggctcccatcttgaagtttatacccatgcctgtactctatggtgtgttcctgtatatgggagtagcatcccttaatggtgtgcagttcatggatcgtctgaagctgcttctgatgcctctgaagcatcagcctgacttcatctacctgcgtcatgttcctctgcgcagagtccacctgttcactttcctgcaggtgttgtgtctggccctgctttggatcctcaagtcaacggtggctgctatcatttttccagtaatgatcttggcacttgtagctgtcagaaaaggcatggactacctcttctcccagcatgacctcagcttcctggatgatgtcattccagaaaaggacaagaaaaagaaggaggatgagaagaaaaagaaaaagaagaagggaagtctggacagtgacaatgatgattctgactgcccatactcagaaaaagttccaagtattaaaattccaatggacatcatggaacagcaacctttcctaagcgatagcaaaccttctgacagagaaagatcaccaacattccttgaacgccacacatcatgctgataaaattcctttccttcagtcactcggtatgccaagtcctcctagaactccagtaaaagttgcctcaaattagactagaacttgaacctgaagacaatgattatttctggaggagcaagggaacagaaactacattgtaacctgtttgtctttcttaaaactgacatttgttgttaatgtcatttgtttttgtttggctgtttgtttattttttaacttttatttcgtctcagtttttggtcacaggccaaataatacagcgctctctctgcttctctcttgcatagatacaatcaagacaatagtgcaccgttccttaaaaacagcatctgaggaatcccccttttgttcttaaactttcagatgtgtcctttgataaccaaattctgtcactcaagacacagacacccacagaccctgtcctttgcctctattaagcagaggatggaagtattaaggattttgtaacaccttttatgaaaatgttgaaggaacttaaaactttagctttggagctgtgcttactggcttgtctttgtctggtagaacaaaccttgacctccagacagagtcccttctcacttatagagctctccaggactggaaaaagtgctgctattttaacttgctcttgcttgtaaatcctaatcttagagttatcaaaagaagaaaaaactgaaggtactttactccctatagagaaaccattgccatcattgtagcaagtgctggaatgtcccttttttcctatgcaacttttttataaccctttaatgaacttatctgtggagtacattgaagaatatttttcttcctagattttgttgtttaaattatggggcctaacctgccacttattttttgtcaatttttaaaacttttttttaattactgtaaagaaaatgaattttttcctgcagcaggaaacatagttttcagtagttctacctcttatttgtagctgccaggctttctgtaaaaattgtattgtatataatgtgatttttacacatacatacacacacaaatacacaatctctagggtaagccagaaggcaagatcagattaaaaacaccatgtttctaagcatccatttttccctttctttaaaagaaacttaactgttctatgaaggagattgagggagaagagacaaactcctatgtcatgagaataaccgatgttctgataatagtagcatctaggtacagatgctggttgtattaccacgtcaatgtcctatgcagtattgttagacattttctcattttgaaatatttgtgtgtttgtgtatgtgctctgtgccatggctggtgtatatatgtgcaatgttagaaggcaaaagagtgatggtaggcagagggcaaagtcattgaatctcttatgccagttttcataaaacccaaaccacatatgaaaaaatccattaagggtccaagaagtctgtccatatgaaaatgagggtaaatatagtttatttcccaggtatcagtcattataattgatataatagctctaacatgcaatataaaattcataggagtattaatagcccatttacacatctataaaatgtaatgggattgcagagctgcagagtacagtgtaacagtactctcatgcaatttttttcaggatgcaaaggcaattattctttgtaagcgggacatttagatatatttgtgtacatattatatgtatgtatatttcaaagtaccacactgaaaattagacatttattaaccaaatttaacgtggtatttaaaggtaatatttttaatatgatacattacatattgtgaatgtatactaaaaaaacattttaaatgttaaaattataatttcagattcatataaccacaactgtgatatatcctaactataaccagttgttgaggggtatactagaagcagaatgaaaccacattttttggtttgataatatgcacttattgactcccactcattgttatgttaattaagttattattctgtctccttgtaattttgattacaaaaattttattatcctgagttagctgttacttttacagtacctgatactcctaaaacttttaacttatacaaattagtcaataatgaccccaattttttcattaaaataatagtggtgaattatatgttattgtgttaaaacctcacttgccaaattctggcttcacatttgtatttagggctatccttaaaatgatgagtctatattatctagctttctattaccctaatataaactggtataagaagactttccttttttctttatgcatggaagcatcaataaattgtttaaaaaccatgtatagtaaattcagcttaacccgtgatcttcttaagttaaaggtacttttgttttataaaagctctagataaaactttcttttctgatcatgaatcaagtatctgtggtttcatgcccctctctatacctttcaaagaactcctgaagcaacttaactcatcatttcagcctctgagtagaggtaaaacctatgtgtacttctgtttatgatccatattgatatttatgacatgaacacagaatagtaccttacatttgctaaacagacagttaatatcaaatcctttcaatattctgggaacccagggaagtttttaaaaatgtcattactttcaaaggaacagaagtagttaaccaaactaacaagcaaaacctgaggtttacctagtgacaccaaattatcggtattttaactgaatttacccattgactaagaatgaaccggatttggtggtggttttgtttctatgcaaactggacacaaattacaacagtaaatttttttataagtgcttctcccttctccatgatgtgacttccggagataaaggattcaaaagataaagacaaagtacgctcagagttgttaaccagaaagtcctggctgtggttgcagaaacactgttggaagaaaagagatgactaagtcaagtgtctgccttatcaaaagagcaaaaatgcctctggttttgtgtttgggagaaaaatatcttggacgcactgttttccttgataaaagtcatcttctctactgtgtgaaatgaatacttggaattctaattgttttgtgtgccaggggcagtaatgtccctgcctcttctcccaatcaaggttgaggagtggggctggggagaggacttaactgacttaagaagtaggaaaacaaaaacctctctcctcagccttccacctccaagagaggaggaaaaacagttgtctgctgtctgtaattcagtttgcgtgtattttatgctcatgcaccaacccatacagagtaaatcttttatcaactatatactggtgtttaatagagaatgattgtcttccgagttttttggttccttttttaactgtgttaaagtacttgaaatgtattgactgctgactatattttaaaaacaaaatgaaataatttgagttgtattacagaggttgacattgttcagggatgggacaaagccttcttcaatccttttcatactacttaatgattttggtgcaggaacctgagattttctgatttatatttcatgatatttcacatttgctcttcacagcatgagcatgaagcccagtggcaccaaatggctgggtacaatcaagtgatattttgtagcacctcactatctgaaaggccatgagttttcagatgatttcattgagcttcattgcagcctgaaattttaaaaaagttgtgtaatacgccaaccagtcaagttgtgttttggccagagatttagatatgtccaatttcctggctcatttcattgtgctctatgggtacgtataaaaagcaagaattctgtttcctaggcaaacattgcaactcagggctaaagtcatccagtgaaacttttagagccagaagtaactttgtcccagtcctacaatgtgaaaagagtgaatagttgcctctttttagccattttcatggctggtacatattcgtacgcattacttttcagaatcaatacgcactttcagatattcttatttttattctcttaagtctttattaactttggagagagaaatgatgcatctttttattttaaatgaagtagatcaacatggtggaacaaaatgataaagaacagaaaacatttcaatatattactaataactttttccaatataaatcctaaaattcctataacatagtattttacagttttatgaagctttctattgtgacttttatggaattaagagatgaagaagatgagatattttagcatttatatttttcaaaattatatgtatacttaaaaataaagtaactttatgc

SEQ ID NO: 1315 - DNA, 1536 bp, Homo sapiens
tgaattcgtgagatggcgagctccacggcaccatggccccgaagctgctgctcctcctctgcctgttctcgggcttgcacgcgcggtccagaaaggtggaagaggatgaatatgaagattcatcatcaaaccaaaagtgggtcttggctccaaaatcccaagacaccgacgtgactcttattctcaacaagttgctaagagagtatgataaaaagctgaggccagatattggaataaaaccgaccgtaattgacgttgacatttatgttaacagcattggtcctgtgtcatcaataaacatggaataccaaattgacatattttttgctcagacctggacagatagtcgccttcgattcaacagcacaatgaaaattcttactctgaacagcaacatggtggggttaatctggatcccagacaccatcttccgcaattctaaaaccgcagaggctcactggatcaccacacccaatcagctcctccggatttggaatgacgggaaaatcctttacactttgaggctcaccatcaatgctgagtgccagctgcagctgcacaacttccccatggacgaacactcctgcccgctgattttctccagctatggctatcccaaagaagaaatgatttatagatggagaaaaaattcagtggaggcagctgaccagaaatcatggcggctttatcagtttgacttcatgggcctcagaaacaccacagaaatcgtgacaacgtctgcaggtgattatgttgtcatgactatatattttgaattgagtagaagaatgggatacttcaccattcagacatacattccctgtatactgactgtggttttatcctgggtgtcattttggatcaaaaaagatgctacgccagcaagaacagcattaggcatcaccacggtgctgaccatgaccaccctgagcaccatcgccaggaagtccttgccacgcgtgtcctacgtgaccgccatggacctttttgtgactgtgtgcttcctgtttgtcttcgccgcgctgatggagtatgccaccctcaactactattccagctgtagaaaaccaaccaccacgaaaaagacaacatcgttactacatccagattcctcaagatggattcctgagcgaataagcctacaagccccttccaactattccctcctggacatgaggccaccaccacctgcgatgatcactttaaacaattccgtttactggcaggaatttgaagatacctgtgtctatgagtgtctggatggcaaagactgtcagagcttcttctgctgctatgaagaatgtaaatcaggatcctggaggaaagggcgtattcacatagacatcttggagctggactcgtactcccgggtctttttccccacgtccttcctgctctttaacctggtctactgggttggatacctgtatctctaagtgttgctcagagtgaagagtgaagagcatttggtacacacttgaccttctgtcgtccccagaccagtagtgaccaatcgggagtagcaaggaaggacac

SEQ ID NO: 1316 - DNA, 2592 bp, Homo sapiens
ggctgcaccatgcacgtgaacggcaaagtggcgctggtgaccggcgcggctcagggcataggcagagcctttgcagaggcgctgctgcttaagggcgccaaggtagcgctggtggattggaatcttgaagcaggtgtacagtgtaaagctgccctggatgagcagtttgaacctcagaagactctgttcatccagtgcgatgtggctgaccagcaacaactgagagacacttttagaaaagttgtagaccactttggaagactggacattttggtcaataatgctggagtgaataatgagaaaaactgggaaaaaactctgcaaattaatttggtttctgttatcagtggaacctatcttggtttggattacatgagtaagcaaaatggaggtgaaggcggcatcattatcaatatgtcatctttagcaggactcatgcccgttgcacagcagccggtttattgtgcttcaaagcatggcatagttggattcacacgctcagcagcgttggctgctaatcttatgaacagtggtgtgagactgaatgccatttgtccaggctttgttaacacagccatccttgaatcaattgaaaaagaagaaaacatgggacaatatatagaatataaggatcatatcaaggatatgattaaatactatggaattttggacccaccattgattgccaatggattgataacactcattgaagatgatgctttaaatggtgctattatgaagatcacaacttctaagggaattcattttcaagactatgatacaactccatttcaagcaaaaacccaatgaacagcttatgtgttagccatagctgaaaataagcacaaatagcttatattcagatcctatcttcatttgaatatagcttttaaatgaaatgttacagtttgaagttttccttcatgcacttggtgataaacgttttctaaatttttagttaagtatatggataaaaagttatgaactattaaaaatgtgatgtggaccaaaggctaggttgtaatcttgatagtctaaaaaatgatcaaaacaaatgattttcaaggaatattcaatattctgcctttcagaaagtgtatttatatctgtgcttcataaatattaatgttcttcagaacatcattttaaaggagatacttgaattgttatttaaatcaaaccagatgtaaaacactcacatacaagttcatactttaaaagaggaaagctacttaacaatgacaaatatttcacaataataatttttacttatataccatctttcaactgaacatttcagttcttccaagagcttcttagagtagtatattttgggggcagtcaaggaataaactacagtgtaaacatatcccagatgaaaactgctgtatggaaaaatgacagaaagtaactgattgacactgttgattcacagttcagcctcctatctgggaaagacatttctttcctctgctcactttaagaacttttaccgactccaaaaatctcaggaattaaacttttaacagttacagcaataaagaatagttagtactccaaaaatattatatttaagatgctcaacaagaaaaaaatgcaaatgtaatatttttttcaaattacttctttattgacttgtccaaatttcaaaagtgcctacccttcaataaaacttttttattctgatctccataaattacttagtcttctatgtatagctatcaaggaaataaaaccaattttgccacagccacaactgtaaatgtttttgtacccatgctgaaactcataacaacacagacataaaaatagctgtgaggttttgctttttttgttgtcagctatcttaagaatcattaaatacacctgctttgggtaaaactctttgcaagcagtaattaacactagtaacagtgaaagcacaagatttccaaatcagtcgttttctcaaaaaaatatcgtataagtgactcatcctgtctgctaactccagacctcccagcttgaagccaaatctttccatgtgagattgatatggatttcctagaagtactggaatgttgtcatatcttgccctattttaattctgctatagaaaacaattgccttcacttttaaggagtaatttgaatattaataactctggtctagattttcatataatgtattaaagacaaagtagtgaacatcaatgaacatctgatagagataaactgtaatcaggcataagcttgtttgtatgttctggcagtgactaatcagtaaatgatgtcggtttgcccagtatcacttatcttctgtatttttcctctgtcgtgtaaatagtataaccttttcatttatggacaattttttggactagtagccttcaatatacattctgctttgaattaattttttcaaatcaataaattatgtagacatttaaaatcaaatatcaagtagaattgaaaaatgtgagttacataagttaaaaacttactttaaatcttaccttctataggtagctctaaataaattcatatggttatatggcaaaaaaaaaaaaaaaaaaaaaaaaaaaaaaaaaaaaaaaaaaaaaaaaaaaaaaaa

SEQ ID NO: 1317 - DNA, 3065 bp, Homo sapiens
gagtgagaccctgcggcagagacgacggaggcggaagcaacccgatcccggaggcggcggcggcggggggagccggagccgcctgggatgttcagtcatgaaacgagtgcgtaccgagcagattcagatggcagtgtcctgctacctcaaacgccggcagtacgtggactcagatggtcccctgaagcaaggactgcggctgtcacagactgctgaagagatggcggccaatctaacagtgcaatcagaatctggttgtgccaacatagtgtctgcagccccttgccaggcagaaccccagcaatatgaagtacagtttggacgactgcggaattttctcactgattctgattcccagcatagccacgaagtgatgcctctcctctatcctctctttgtctacctccatctcaacctggtccaaaacagtccgaagagcacagtggaaagtttttacagccgcttccatggaatgtttctgcagaatgctagccagaaggatgtcattgagcagctacagaccactcaaaccatccaggacatcctatctaacttcaagcttcgagcattcctagataacaagtacgtggtccgtctccaagaagacagctacaactaccttatccgctacctccaaagtgacaacaatactgccctgtgcaaagtcctcaccttacatattcatcttgacgtgcagcctgccaagagaacagactatcagctgtatgccagtggcagctcctcccgcagtgagaacaacggtttggagccccctgacatgcccagccctattctgcagaacgaggctgccctagaggtcttacaggagagcattaagcgcgtcaaggatgggcctccctccctcactaccatctgcttctatgccttctataacacagagcagctgttgaacactgcagaaatctcccccgatagcaagctgcttgctgctgggtttgacaactcctgtataaaactttggagtttacgatccaagaagttaaaatcagagccccaccaagtagacgtgtcccgcatccatttggcttgtgatattctggaggaggaggatgatgaggatgataatgcaggcacggagatgaagatactgcggggccactgcggaccagtgtacagcacgaggttcctcgcggacagctcagggttgctctcttgttctgaagacatgtccatcagatactgggatctggggagtttcaccaacactgtgttgtaccaaggacatgcctatcctgtgtgggatctggacatcagtccatatagcctgtacttcgccagcgggtcccacgaccgcaccgccaggctgtggtcatttgatcggacgtacccgctgaggatatatgcaggacacctggcagatgtggactgtgtcaaattccaccctaattcaaactacttggccacgggctcaaccgacaagaccgtccggctgtggagcgctcagcaggggaactcggtgaggcttttcacaggccaccgtggccccgtgctttctctcgccttttctcccaacggtaagtacttggcgtctgctggcgaggaccagcggttgaagctgtgggacttggcctctgggaccctttataaagagttgagaggccacacagacaatatcaccagcctcaccttcagtccagacagcggcttgattgcctctgcctccatggacaactcggtgcgcgtctgggacatcaggaacacttactgcagtgcacctgccgacggctcctccagcgagctcgtgggcgtgtacaccgggcagatgagcaacgtcctgagcgtgcagttcatggcctgtaaccttcttctggtgactggaattacacaagaaaatcaggaacattaattttttaactttgttggaacggactggggtaacagtggaaagcctccagttgcaatccttcaatgagctgagattgaatcattgactgtgaaagagccccctcctcccctctctcctgggccctcattccgggcaggtcccccttcactcagccccccagtgtcgaaggccaaggttggggaggggaacaggagagaggcaatgatgagtgatcaagaattagagtgccctggaggtcactcacaagtcctcatggagactctgccgtgacctcgcgcatgcgagcaccttcctgtctctcattttcaccatctgactggggctaggtttggttagagggcggctgtagagcaccctcaggagaagtggcgccgcaggggtcacgcatggtccagccctcaggtgggagggaagtccttgttggcagagggatgtggggcgggaatgaggaaaggggagggcatgatcctggcaaatagtctttccttttccgtaattacagagaaccaggattttttttaattattgttattataattataattattattattattgacatgaggaaacctagcactggcagagggcaccttctctgcttttaatctttcaggtttgactcctggcactggttttgatacttggaattttgaggttcagggaattcagagaatttggtagcacagtgtattgggagaaagggaaatttcgggtgacagattgatcaccctggctgacatgtttctggaagtgggtgggtgggtttgattgagaacactttgggctcctgcagtgatggtgggaaagaaaaattctttccaaagctgcacttctcttaataattctctcccctcaaaagaaagattatgataaagaataatttggagtaataagtaacaagatagaattagaaaaatgttgaatttctgaatgaccattcagaggtgtggctttttccacgtctttttctcctgcaatgaactgctcccacgtcctgcactgcaataccagtctaatgaacactttgtgaaacaaatcgtaagtatgtacgcacgcatatcaaactatgctctgaggataaagcaagttctaatttgtggaaaaaggattaaatatttctgttttctgaaaagagttattttgtattttgttttctattaaaatgtatttagtttcaaaaaaaaaaaaaaaaaaaaaa

SEQ ID NO: 1318 - DNA, 4529 bp, Homo sapiens
gtctgcccgccgccgccactgctgctgccaccgccgtcgccgccgccgccgccgccgccgctgctgctgccggtgctaaggagttcgctggagccctttcctcagacccggcccggtcttcgcgcccggactcctggcgccagcgctaggcgcactcaccgctctgacgggtgcagacgcgggagttgtcccagactgtggagtggcgggcacggccccagccccccttcccttccctgaccccttcttgccatcgccccagacatggggaacgcggcgaccgccaagaaaggcagcgaggtggagagcgtgaaagagtttctagccaaagccaaagaagactttttgaaaaaatgggagaatccaactcagaataatgccggacttgaagattttgaaaggaaaaaaacccttggaacaggttcatttggaagagtcatgttggtaaaacacaaagccactgaacagtattatgccatgaagatcttagataagcagaaggttgttaaactgaagcaaatagagcatactttgaatgagaaaagaatattacaggcagtgaattttcctttccttgttcgactggagtatgcttttaaggataattctaatttatacatggttatggaatatgtccctgggggtgaaatgttttcacatctaagaagaattggaaggttcagtgagccccatgcacggttctatgcagctcagatagtgctaacattcgagtacctccattcactagacctcatctacagagatctaaaacctgaaaatctcttaattgaccatcaaggctatatccaggtcacagactttgggtttgccaaaagagttaaaggcagaacttggacattatgtggaactccagagtatttggctccagaaataattctcagcaagggctacaataaggcagtggattggtgggcattaggagtgctaatctatgaaatggcagctggctatcccccattctttgcagaccaaccaattcagatttatgaaaagattgtttctggaaaggtccgattcccatcccacttcagttcagatctcaaggaccttctacggaacctgctgcaggtggatttgaccaagagatttggaaatctaaagaatggtgtcagtgatataaaaactcacaagtggtttgccacgacagattggattgctatttaccagaggaaggttgaagctccattcataccaaagtttagaggctctggagataccagcaactttgatgactatgaagaagaagatatccgtgtctctataacagaaaaatgtgcaaaagaatttggtgaattttaaagaggaacaagatgacatctgagctcacactcagtgtttgcactctgttgagagataaggtagagctgagaccgtccttgttgaagcagttacctagttccttcattccaacgactgagtgaggtctttattgccatcatcccgtgtgcgcactctgcatccacctatgtaacaaggcaccgctaagcaagcattgtctgtgccataacacagtactagaccactttcttacttctctttgggttgtctttctcctctcctatatccatttcttccttttccaatttcattggttttctctaaacagtgctccattttattttgttggtgtttcagatgggcagtgttatggctacgtgatatttgaagggaaggataagtgttgctttcagtagttattgccaatattgttgttggtcaatggcttgaagataaactttctaataattattatttctttgagtagctcagacttggttttgccaaaactcttggtaatttttgaagatagactgtcttatcaccaaggaaatttatacaaattaagactaactttcttggaattcactattctggcaataaattttggtagactaatacagtacagctagacccagaaatttggaaggctgtagatcagaggttctagttccctttccctccttttatatcctcctctccttgagtaatgaagtgaccagcctgtgtagtgtgacaaacgtgtctcattcagcaggaaaaactaatgatatggatcatcacccagattctctcacttggtaccagcatttctgtaggtattagagaagagttctaagttttctaaaccttaactgttccttaaggattttagccagtattttaatagaacatgattaatgaaagtgacaaattttaaattttctctaatagtcctcatcataaactttttaaaggaaaataagcaaactaaaaagaacattggtttagataaatacttatactttgcaaagtcaaaaatggcttgatttttggaaacaatatagaggtattcatatttaaatgagggtttacatttgttttgttttgtaaccgttaaaaagaagttgtttccagctaattattgtggtgtactatatttgtgagcctagggtaggggcactgctgcaacttctgctttcatcccatgcctcatcaatgaggaaagggaacaaagtgtataaaactgccacaattgtattttaattttgaggtatgatattttcagatatttcataatttctaacctctgttctctcagtaaacagaatgtctgatcgatcatgcagatacaatgttggtatttgagaggttagtttttttcctacacttttttttgccaactgacttaacaacattgctgtcaggtggaaatttcaagcacttttgcacatttagttcagtgtttgttgagaatccatggcttaacccacttgttttgctatttttttctttgcttttaattttccccatctgattttatctctgcgtttcagtgacctaccttaaaacaacacacgagaagagttaaactgggttcattttaatgatcaatttacctgcatataaaatttatttttaatcaagctgatcttaatgtatataatcattctatttgctttattatcggtgcaggtaggtcattaacaccacttcttttcatctgtaccacaccctggtgaaacctttgaagacataaaaaaaacctgtctgagatgttctttctaccaatctatatgtctttcggttatcaagtgtttctgcatggtaatgtcatgtaaatgctgatattgatttcactggtccatctatatttaaaacgtgcaagaaaaaaataaaatactctgctctagcaagttttgtgtaacaaaggcatatcgtcatgttaataaatttaaaacatcattcgtataaaatattttaattttcttgtatttcatttagacccaagaacatgctgaccaatgtgttctatatgtaaactacaaattctatggtagctttgttgtatattattgtaaaattattttaataagtcatggggatgacaatttgattattacaatttagttttcagtaatcaaaaagatttctatgaattctaaaaaatatttttttctatgaaattactagtgcccagctgtagaatctaccttaggtagatgatccctagacatacgttggttttgagggctattcagccattccattttactctctatttaaaggccgtgagcaagcttgtcatgagcaaatatgtcaagggagtcaatttctgaccaatcaagtacactaaattagaatatttttaaagtatgtaacattcccagtttcagccacaatttagccaagaataagataaaaacttgaataagaagtaagtagcataaatcagtatttaacctaaaattacatatttgaaacagaagatattatgttatgctcagtaaataattaagagatggcattgtgtaagaaggagccctagactgaaagtcaagacatctgaatttcaggctggaaaactatcagtatgatctcagcctcagttctcttgtctgtaaaatggaagaactggattaggcagtttgtaagattcctcctaactttcacagtcgatgacaagattgtctttttatctgatattttgaagggtatattgctttgaagtaagtctcaataaggcaatatattttagggcatctttcttcttatctctgacagtgttcttaaaattatttgaatatcataagagccttggtgtctgtcctaattcctttctcactcaccgatgctgaatacccagttgaatcaaactgtcaacctaccaaaaacgatattgtggcttatgggtattgctgtctcattcttggtatattcttgtgttaactgcccattggcctgaaaatactcattgtaagcctgaaaaaaaaaatctttcccactgttttttctgcttgttgtaagaatcaaatgaaataatgtatgtgaaagcaccttgtaaactgtaacctatcaatgtaaaatgttaaggtgtgttgttatttcattaattacttctttgtttagaatggaatttcctatgcactactgtagctaggaaatgctgaaaacaactgtgttttttaattaatcaataactgcaaaattaaagtaccttcaatggataagacaaaaaaaaaaaaaaaaaa

1. A biomarker for inflammatory bowel disease status comprising one or more of Markers 1-97, 99-211, 213-264, 266-401 and combinations thereof.

2. The biomarker for inflammatory bowel disease status of claim 1, wherein Markers 1-31, 76-97, 125-136, 187-211, 213-230, 231-264, 266-306 are Markers of Crohn's disease

3. The biomarker for inflammatory bowel disease status of claim 1, wherein Markers 187-230 and 266-306 are Markers of Crohn's disease and ulcerative colitis.

4. (canceled)

5. (canceled)

6. The biomarker for inflammatory bowel disease status of claim 1, wherein one or more of Markers 49-75, 99-124, 137-230, 266-306, and 307-401 are markers of ulcerative colitis.

7.-10. (canceled)

11. The biomarker for inflammatory bowel disease status of claim 1, wherein Markers 1-31 are Markers of Crohn's Disease.

12. The biomarker for inflammatory bowel disease status of claim 1, wherein Markers 32-48 are markers of IBD.

13. The biomarker for inflammatory bowel disease status of claim 1, comprising Markers 1, 2, 4 and 5.

14. The biomarker for inflammatory bowel disease status of claim 1, comprising Markers 6 and 10.

15. The biomarker for inflammatory bowel disease status of claim 1, comprising Markers 17, 18, and 21.

16. (canceled)

17. (canceled)

18. The biomarker for inflammatory bowel disease status of claim 1, comprising Markers 69, 74 and 75.

19.-24. (canceled)

25. A method of qualifying inflammatory bowel disease status in a subject comprising:
(a) measuring at least one biomarker in a sample from the subject, wherein the biomarker is selected from one or more of the biomarkers of Tables 1-9, and
(b) correlating the measurement with inflammatory bowel disease status.

26. The method of claim 25, wherein the inflammatory bowel disease is Crohn's disease or ulcerative colitis.

27. The method of claim 25, further comprising:
(c) managing subject treatment based on the status.

28. The method of claim 27, wherein managing subject treatment is selected from ordering further diagnostic tests, administering at least one therapeutic agent, surgery, surgery followed or preceded by administering at least one therapeutic agent, biotherapy, and taking no further action.

29. The method of claim 28, wherein the therapeutic agent is selected from one or more of sulfa drugs, corticosteriods (prednisone), 5-aminosalicylates (Asacol, Pentasa, Rowasa, or 5-ASA), immunosuppressives (azathioprine, Imuran, Cyclosporine, 6-MP, Purinethol and Methotrexate), anti-TNF (Remicade), anticholinergics, dicyclomine (Bentyl), belladonna/phenobarbital (Donnatal, Antispas, bBarbidonna, donnapine, hyosophen, Spasmolin), hyoscyamine (Levsin, Anaspaz), chlordiazepoxide/clidinium (Librax), anti-diarrheals, diphenoxylate/atropine (Lomotil), alosetron hydrochloride (Lotronex), tegaserod (Zelnorm, Zelmac), rifaximin (Xifaxin), sulfasalazine (Azulfadine), mesalamine (Asacol, Pentasa, Rowasa), osalazine (Dipentum), (Colazal), corticosteroids (prednisone), balsalazide disodium (Colazal®), cyclosporine, methotrexate, infliximab (Remicade), rifaximin, and budesonide (Entocort EC).

30. The method of claim 27, further comprising:
(d) measuring the at least one biomarker after subject management.

31. The method of claim 25, wherein the inflammatory bowel disease status is selected from one or more of the presence or absence of alternating diarrhea and constipation, abdominal pain, bloating, spasms, nausea, bloody diarrhea, fever, dehydration, eye inflammation, joint pain, skin rashes or lesions, mouth ulcers, chronic diarrhea, weight loss, lack of appetite, nutritional deficiencies, and inflamed colon.

32. The method of claim 31, further comprising assessing the status of the inflammatory bowel disease.

33. The method of claim 32, wherein the inflammatory bowel disease status is assessed by barium enema, upper GI series, stool culture, blood tests (to determine a white blood cell count or if anemia is present), fecal occult blood test, sigmoidoscopy, and colonoscopy.

34. A method for differentiating between a diagnosis of inflammatory bowel disease and inflammatory bowel disease comprising:
(a) detecting in a subject sample an amount of at least one biomarker selected from one or more of the biomarkers of Tables 1-9, and
(b) correlating the amount with a diagnosis of inflammatory bowel disease or inflammatory bowel disease.

35. The method of claim 27, wherein the marker is detected by mass spectrometry, PCR, and microarray analysis.

36-40. (canceled)

41. A kit for aiding the diagnosis of inflammatory bowel disease, comprising:
an adsorbent, wherein the adsorbent retains one or more biomarkers selected from one or more of the markers of Tables 1-9, and written instructions for use of the kit for detection of inflammatory bowel disease.

42. A kit for aiding the diagnosis of the subtypes of inflammatory bowel disease, comprising:
an adsorbent, wherein the adsorbent retains one or more biomarkers selected from each of Markers of Tables 1-9, and written instructions for use of the kit for detection of the IBD or a subtype of inflammatory bowel disease, e.g., UC or CD.

43. The kit of claim 41, wherein the instructions provide for contacting a test sample with the adsorbent and detecting one or more biomarkers retained by the adsorbent.

44.-47. (canceled)

48. A method comprising measuring a plurality of biomarkers in a sample from the subject, wherein the biomarkers are selected from one or more of the markers of Tables 1-9.

49. (canceled)

50. (canceled)

51. The method of claim 48, further comprising communicating a diagnosis to a subject, wherein the diagnosis results from the correlation of the biomarkers of Tables 1-9 with inflammatory bowel disease.

52. A method for identifying a candidate compound for treating inflammatory bowel disease comprising:
a) contacting one or more of the biomarkers of Tables 1-9 with a test compound; and
b) determining whether the test compound interacts with the biomarker,
wherein a compound that interacts with the biomarker is identified as a candidate compound for treating inflammatory bowel disease.

53. A method of treating inflammatory bowel disease comprising administering to a subject suffering from or at risk of developing inflammatory bowel disease a therapeutically effective amount of a compound capable of modulating the expression or activity of one or more of the biomarkers of Tables 1-9.

54.-58. (canceled)

59. A purified biomolecule selected from the biomarkers of Tables 1-9.

60-65. (canceled)
